United States Patent Application Publication US 2005/0287570 A1 - sequence listing, part 14

SEQ ID NO: 358298 - DNA, 25 bp, Artificial
  Probe
gcgtgctctaatctctctgttaccc

SEQ ID NO: 358299 - DNA, 25 bp, Artificial
  Probe
ctcactgccccgtaaatctgctgaa

SEQ ID NO: 358300 - DNA, 25 bp, Artificial
  Probe
atgagggcaactcactgccccgtaa

SEQ ID NO: 358301 - DNA, 25 bp, Artificial
  Probe
cgtgctctaatctctctgttaccct

SEQ ID NO: 358302 - DNA, 25 bp, Artificial
  Probe
aagatcattggttgggacgcttgct

SEQ ID NO: 358303 - DNA, 25 bp, Artificial
  Probe
actgttgtggaaccaattgtcagtt

SEQ ID NO: 358304 - DNA, 25 bp, Artificial
  Probe
aggtatgcaggcacacgaatggcat

SEQ ID NO: 358305 - DNA, 25 bp, Artificial
  Probe
cagttcctcgttgtggaaataaggt

SEQ ID NO: 358306 - DNA, 25 bp, Artificial
  Probe
gaaccccttgttctccactagcagt

SEQ ID NO: 358307 - DNA, 25 bp, Artificial
  Probe
gcacttgtgctgaaggactttgttg

SEQ ID NO: 358308 - DNA, 25 bp, Artificial
  Probe
ggagcagcacttgtgctgaaggact

SEQ ID NO: 358309 - DNA, 25 bp, Artificial
  Probe
atttcaaatatgcagttcctcgttg

SEQ ID NO: 358310 - DNA, 25 bp, Artificial
  Probe
accgcgggttgcatataagaatttc

SEQ ID NO: 358311 - DNA, 25 bp, Artificial
  Probe
cacaaaatttctacatcatggatgg

SEQ ID NO: 358312 - DNA, 25 bp, Artificial
  Probe
ccttgttctccactagcagtctgca

SEQ ID NO: 358313 - DNA, 25 bp, Artificial
  Probe
ataccatgtaaaggatgcttcacca

SEQ ID NO: 358314 - DNA, 25 bp, Artificial
  Probe
ttgtaggtttgcacccactggaaag

SEQ ID NO: 358315 - DNA, 25 bp, Artificial
  Probe
acacgaatggcatttgtgatcttcc

SEQ ID NO: 358316 - DNA, 25 bp, Artificial
  Probe
aagactgtctctctaatcactgttg

SEQ ID NO: 358317 - DNA, 25 bp, Artificial
  Probe
ccagaatactgtagtggagtctcag

SEQ ID NO: 358318 - DNA, 25 bp, Artificial
  Probe
tcattggttgggacgcttgcttgag

SEQ ID NO: 358319 - DNA, 25 bp, Artificial
  Probe
ttgcttgagtcaaccgcgggttgca

SEQ ID NO: 358320 - DNA, 25 bp, Artificial
  Probe
tgttgtcaatcttgtaggtttgcac

SEQ ID NO: 358321 - DNA, 25 bp, Artificial
  Probe
aggaagtaaacctctcgcatgtcaa

SEQ ID NO: 358322 - DNA, 25 bp, Artificial
  Probe
gaagatcattggttgggacgcttgc

SEQ ID NO: 358323 - DNA, 25 bp, Artificial
  Probe
gtagcgaccgccaattgcagtgtca

SEQ ID NO: 358324 - DNA, 25 bp, Artificial
  Probe
aaccaattgtcagttaattgggagc

SEQ ID NO: 358325 - DNA, 25 bp, Artificial
  Probe
caaaggtgaccgatttggaaactgt

SEQ ID NO: 358326 - DNA, 25 bp, Artificial
  Probe
ctctttttggataccatgtaaagga

SEQ ID NO: 358327 - DNA, 25 bp, Artificial
  Probe
ttaattgggagcagcacttgtgctg

SEQ ID NO: 358328 - DNA, 25 bp, Artificial
  Probe
tgatgagcaattgttcccatcataa

SEQ ID NO: 358329 - DNA, 25 bp, Artificial
  Probe
ttgtcagttaattgggagcagcact

SEQ ID NO: 358330 - DNA, 25 bp, Artificial
  Probe
cacacgaatggcatttgtgatcttc

SEQ ID NO: 358331 - DNA, 25 bp, Artificial
  Probe
ggatggaaccccttgttctccacta

SEQ ID NO: 358332 - DNA, 25 bp, Artificial
  Probe
aaatttctacatcatggatggaacc

SEQ ID NO: 358333 - DNA, 25 bp, Artificial
  Probe
taaataccaaaggtgaccgatttgg

SEQ ID NO: 358334 - DNA, 25 bp, Artificial
  Probe
atcatggatggaaccccttgttctc

SEQ ID NO: 358335 - DNA, 25 bp, Artificial
  Probe
tgtaaaggatgcttcaccagcatgc

SEQ ID NO: 358336 - DNA, 25 bp, Artificial
  Probe
gatgagcaattgttcccatcataat

SEQ ID NO: 358337 - DNA, 25 bp, Artificial
  Probe
tcaggaaactgtagcgaccgccaat

SEQ ID NO: 358338 - DNA, 25 bp, Artificial
  Probe
ccactggaaaggtatgcaggcacac

SEQ ID NO: 358339 - DNA, 25 bp, Artificial
  Probe
aggtttgcacccactggaaaggtat

SEQ ID NO: 358340 - DNA, 25 bp, Artificial
  Probe
gtctcagagcattgcccacaaaatt

SEQ ID NO: 358341 - DNA, 25 bp, Artificial
  Probe
gtcaaccgcgggttgcatataagaa

SEQ ID NO: 358342 - DNA, 25 bp, Artificial
  Probe
ttctggacatgatgagcaattgttc

SEQ ID NO: 358343 - DNA, 25 bp, Artificial
  Probe
taaacctctcgcatgtcaagaggag

SEQ ID NO: 358344 - DNA, 25 bp, Artificial
  Probe
tggttgggacgcttgcttgagtcaa

SEQ ID NO: 358345 - DNA, 25 bp, Artificial
  Probe
gaaactgtagcgaccgccaattgca

SEQ ID NO: 358346 - DNA, 25 bp, Artificial
  Probe
ttaaataccaaaggtgaccgatttg

SEQ ID NO: 358347 - DNA, 25 bp, Artificial
  Probe
gcttcaccagcatgctataaagaat

SEQ ID NO: 358348 - DNA, 25 bp, Artificial
  Probe
agttccggaattatctctctgtgtt

SEQ ID NO: 358349 - DNA, 25 bp, Artificial
  Probe
gttccggaattatctctctgtgttc

SEQ ID NO: 358350 - DNA, 25 bp, Artificial
  Probe
ccgaaaacacattgtcaaacgcttc

SEQ ID NO: 358351 - DNA, 25 bp, Artificial
  Probe
attgcagtagttctaatagactaga

SEQ ID NO: 358352 - DNA, 25 bp, Artificial
  Probe
aattatctctctgtgttcttccgaa

SEQ ID NO: 358353 - DNA, 25 bp, Artificial
  Probe
gaattatctctctgtgttcttccga

SEQ ID NO: 358354 - DNA, 25 bp, Artificial
  Probe
ctgcaaacactgttcaattttccag

SEQ ID NO: 358355 - DNA, 25 bp, Artificial
  Probe
tgtcaaacgcttctgcaaacactgt

SEQ ID NO: 358356 - DNA, 25 bp, Artificial
  Probe
tccggaattatctctctgtgttctt

SEQ ID NO: 358357 - DNA, 25 bp, Artificial
  Probe
agaagttccggaattatctctctgt

SEQ ID NO: 358358 - DNA, 25 bp, Artificial
  Probe
gttctaatagactagaccaggcaat

SEQ ID NO: 358359 - DNA, 25 bp, Artificial
  Probe
ctaatagactagaccaggcaatgca

SEQ ID NO: 358360 - DNA, 25 bp, Artificial
  Probe
tactttggactgaataattgcagta

SEQ ID NO: 358361 - DNA, 25 bp, Artificial
  Probe
gtgttcttccgaaaacacattgtca

SEQ ID NO: 358362 - DNA, 25 bp, Artificial
  Probe
ttgtcaaacgcttctgcaaacactg

SEQ ID NO: 358363 - DNA, 25 bp, Artificial
  Probe
attgtcaaacgcttctgcaaacact

SEQ ID NO: 358364 - DNA, 25 bp, Artificial
  Probe
tctaatagactagaccaggcaatgc

SEQ ID NO: 358365 - DNA, 25 bp, Artificial
  Probe
ctgttcaattttccagcaagtcaat

SEQ ID NO: 358366 - DNA, 25 bp, Artificial
  Probe
ccaggaatactttggactgaataat

SEQ ID NO: 358367 - DNA, 25 bp, Artificial
  Probe
ttctgcaaacactgttcaattttcc

SEQ ID NO: 358368 - DNA, 25 bp, Artificial
  Probe
aagttccggaattatctctctgtgt

SEQ ID NO: 358369 - DNA, 25 bp, Artificial
  Probe
ccggaattatctctctgtgttcttc

SEQ ID NO: 358370 - DNA, 25 bp, Artificial
  Probe
aacacattgtcaaacgcttctgcaa

SEQ ID NO: 358371 - DNA, 25 bp, Artificial
  Probe
cttccgaaaacacattgtcaaacgc

SEQ ID NO: 358372 - DNA, 25 bp, Artificial
  Probe
ctctctgtgttcttccgaaaacaca

SEQ ID NO: 358373 - DNA, 25 bp, Artificial
  Probe
agttctaatagactagaccaggcaa

SEQ ID NO: 358374 - DNA, 25 bp, Artificial
  Probe
ttcactattaaaaaatactgagcat

SEQ ID NO: 358375 - DNA, 25 bp, Artificial
  Probe
gttcaattttccagcaagtcaatcc

SEQ ID NO: 358376 - DNA, 25 bp, Artificial
  Probe
cggaattatctctctgtgttcttcc

SEQ ID NO: 358377 - DNA, 25 bp, Artificial
  Probe
ctgtgttcttccgaaaacacattgt

SEQ ID NO: 358378 - DNA, 25 bp, Artificial
  Probe
acattgtcaaacgcttctgcaaaca

SEQ ID NO: 358379 - DNA, 25 bp, Artificial
  Probe
ttccggaattatctctctgtgttct

SEQ ID NO: 358380 - DNA, 25 bp, Artificial
  Probe
ttctaatagactagaccaggcaatg

SEQ ID NO: 358381 - DNA, 25 bp, Artificial
  Probe
cactgttcaattttccagcaagtca

SEQ ID NO: 358382 - DNA, 25 bp, Artificial
  Probe
tcaaacgcttctgcaaacactgttc

SEQ ID NO: 358383 - DNA, 25 bp, Artificial
  Probe
gtcaaacgcttctgcaaacactgtt

SEQ ID NO: 358384 - DNA, 25 bp, Artificial
  Probe
taaaaaatactgagcattgggaaaa

SEQ ID NO: 358385 - DNA, 25 bp, Artificial
  Probe
taatagactagaccaggcaatgcag

SEQ ID NO: 358386 - DNA, 25 bp, Artificial
  Probe
gaagttccggaattatctctctgtg

SEQ ID NO: 358387 - DNA, 25 bp, Artificial
  Probe
tgtgttcttccgaaaacacattgtc

SEQ ID NO: 358388 - DNA, 25 bp, Artificial
  Probe
aataattgcagtagttctaatagac

SEQ ID NO: 358389 - DNA, 25 bp, Artificial
  Probe
taattgcagtagttctaatagacta

SEQ ID NO: 358390 - DNA, 25 bp, Artificial
  Probe
ggaattatctctctgtgttcttccg

SEQ ID NO: 358391 - DNA, 25 bp, Artificial
  Probe
aatagactagaccaggcaatgcagg

SEQ ID NO: 358392 - DNA, 25 bp, Artificial
  Probe
aacactgttcaattttccagcaagt

SEQ ID NO: 358393 - DNA, 25 bp, Artificial
  Probe
tgttcttccgaaaacacattgtcaa

SEQ ID NO: 358394 - DNA, 25 bp, Artificial
  Probe
agccaagaggtgtacccccaaagat

SEQ ID NO: 358395 - DNA, 25 bp, Artificial
  Probe
gagaatttcacagagcgggtgcagt

SEQ ID NO: 358396 - DNA, 25 bp, Artificial
  Probe
cccgatgcccgcatgttcagggcgg

SEQ ID NO: 358397 - DNA, 25 bp, Artificial
  Probe
ataagccctagtgttcaaaatgcag

SEQ ID NO: 358398 - DNA, 25 bp, Artificial
  Probe
tcccggagaatttcacagagcgggt

SEQ ID NO: 358399 - DNA, 25 bp, Artificial
  Probe
aggtgtacccccaaagatgaggtgg

SEQ ID NO: 358400 - DNA, 25 bp, Artificial
  Probe
cagaccaaccgtgtgctgtttgaaa

SEQ ID NO: 358401 - DNA, 25 bp, Artificial
  Probe
gcagaccaaccgtgtgctgtttgaa

SEQ ID NO: 358402 - DNA, 25 bp, Artificial
  Probe
aaccgtgtgctgtttgaaaataagc

SEQ ID NO: 358403 - DNA, 25 bp, Artificial
  Probe
ccgtccgacccagttcagtggactt

SEQ ID NO: 358404 - DNA, 25 bp, Artificial
  Probe
gcgtcttcccggagaatttcacaga

SEQ ID NO: 358405 - DNA, 25 bp, Artificial
  Probe
gaccaaccgtgtgctgtttgaaaat

SEQ ID NO: 358406 - DNA, 25 bp, Artificial
  Probe
accgtgtgctgtttgaaaataagcc

SEQ ID NO: 358407 - DNA, 25 bp, Artificial
  Probe
agcggaaacctaagccaagaggtgt

SEQ ID NO: 358408 - DNA, 25 bp, Artificial
  Probe
ttcccggagaatttcacagagcggg

SEQ ID NO: 358409 - DNA, 25 bp, Artificial
  Probe
ggtgtacccccaaagatgaggtggt

SEQ ID NO: 358410 - DNA, 25 bp, Artificial
  Probe
ccaaccgtgtgctgtttgaaaataa

SEQ ID NO: 358411 - DNA, 25 bp, Artificial
  Probe
cttcccggagaatttcacagagcgg

SEQ ID NO: 358412 - DNA, 25 bp, Artificial
  Probe
gtcttcccggagaatttcacagagc

SEQ ID NO: 358413 - DNA, 25 bp, Artificial
  Probe
caaccgtgtgctgtttgaaaataag

SEQ ID NO: 358414 - DNA, 25 bp, Artificial
  Probe
tcttcccggagaatttcacagagcg

SEQ ID NO: 358415 - DNA, 25 bp, Artificial
  Probe
accaaccgtgtgctgtttgaaaata

SEQ ID NO: 358416 - DNA, 25 bp, Artificial
  Probe
tcctagttgagttcccgatgcccgc

SEQ ID NO: 358417 - DNA, 25 bp, Artificial
  Probe
cgtcttcccggagaatttcacagag

SEQ ID NO: 358418 - DNA, 25 bp, Artificial
  Probe
gccgtccgacccagttcagtggact

SEQ ID NO: 358419 - DNA, 25 bp, Artificial
  Probe
agaccaaccgtgtgctgtttgaaaa

SEQ ID NO: 358420 - DNA, 25 bp, Artificial
  Probe
gttgagttcccgatgcccgcatgtt

SEQ ID NO: 358421 - DNA, 25 bp, Artificial
  Probe
gagcggaaacctaagccaagaggtg

SEQ ID NO: 358422 - DNA, 25 bp, Artificial
  Probe
gccaagaggtgtacccccaaagatg

SEQ ID NO: 358423 - DNA, 25 bp, Artificial
  Probe
ctcctagttgagttcccgatgcccg

SEQ ID NO: 358424 - DNA, 25 bp, Artificial
  Probe
tgtacccccaaagatgaggtggttt

SEQ ID NO: 358425 - DNA, 25 bp, Artificial
  Probe
ttgagttcccgatgcccgcatgttc

SEQ ID NO: 358426 - DNA, 25 bp, Artificial
  Probe
gtgtacccccaaagatgaggtggtt

SEQ ID NO: 358427 - DNA, 25 bp, Artificial
  Probe
taagccaagaggtgtacccccaaag

SEQ ID NO: 358428 - DNA, 25 bp, Artificial
  Probe
aagacagctggaagcgtttccatgc

SEQ ID NO: 358429 - DNA, 25 bp, Artificial
  Probe
ctcgctatccagagggcgaagaaga

SEQ ID NO: 358430 - DNA, 25 bp, Artificial
  Probe
caattttggagatctttcctgcagt

SEQ ID NO: 358431 - DNA, 25 bp, Artificial
  Probe
tccatgagtcccaagacaattttgg

SEQ ID NO: 358432 - DNA, 25 bp, Artificial
  Probe
attgcctgaatttatcttccatgag

SEQ ID NO: 358433 - DNA, 25 bp, Artificial
  Probe
atgcaagtgactgaggtgattaccc

SEQ ID NO: 358434 - DNA, 25 bp, Artificial
  Probe
tccttcctggcgagaaactggaaag

SEQ ID NO: 358435 - DNA, 25 bp, Artificial
  Probe
attttttggactccatacaacctgg

SEQ ID NO: 358436 - DNA, 25 bp, Artificial
  Probe
tgcagtcctcgctatccagagggcg

SEQ ID NO: 358437 - DNA, 25 bp, Artificial
  Probe
gtttccatgctctaagaatgaacat

SEQ ID NO: 358438 - DNA, 25 bp, Artificial
  Probe
tacacctggacctggccatgcaagt

SEQ ID NO: 358439 - DNA, 25 bp, Artificial
  Probe
tttttggactccatacaacctggtt

SEQ ID NO: 358440 - DNA, 25 bp, Artificial
  Probe
gcacatttttggagaccagctgtca

SEQ ID NO: 358441 - DNA, 25 bp, Artificial
  Probe
atgaacatttttggtttagctcttc

SEQ ID NO: 358442 - DNA, 25 bp, Artificial
  Probe
gaaatgtggcaatctacctgagaaa

SEQ ID NO: 358443 - DNA, 25 bp, Artificial
  Probe
tacaacctggttcttcttctgtctg

SEQ ID NO: 358444 - DNA, 25 bp, Artificial
  Probe
ccttcctggcgagaaactggaaaga

SEQ ID NO: 358445 - DNA, 25 bp, Artificial
  Probe
tcccaagacaattttggagatcttt

SEQ ID NO: 358446 - DNA, 25 bp, Artificial
  Probe
gtggcaatctacctgagaaaatata

SEQ ID NO: 358447 - DNA, 25 bp, Artificial
  Probe
cttcggctctttttccacagaaatg

SEQ ID NO: 358448 - DNA, 25 bp, Artificial
  Probe
ttggactccatacaacctggttctt

SEQ ID NO: 358449 - DNA, 25 bp, Artificial
  Probe
gcattgcctgaatttatcttccatg

SEQ ID NO: 358450 - DNA, 25 bp, Artificial
  Probe
ggttcttcttctgtctgctttccac

SEQ ID NO: 358451 - DNA, 25 bp, Artificial
  Probe
agctgtcagcagagcatacacctgg

SEQ ID NO: 358452 - DNA, 25 bp, Artificial
  Probe
gcagcattgcctgaatttatcttcc

SEQ ID NO: 358453 - DNA, 25 bp, Artificial
  Probe
ttccacagaaatgtggcaatctacc

SEQ ID NO: 358454 - DNA, 25 bp, Artificial
  Probe
gaatttatcttccatgagtcccaag

SEQ ID NO: 358455 - DNA, 25 bp, Artificial
  Probe
gcctgaatttatcttccatgagtcc

SEQ ID NO: 358456 - DNA, 25 bp, Artificial
  Probe
aacctggttcttcttctgtctgctt

SEQ ID NO: 358457 - DNA, 25 bp, Artificial
  Probe
gtcccaagacaattttggagatctt

SEQ ID NO: 358458 - DNA, 25 bp, Artificial
  Probe
ttcctggcgagaaactggaaagaac

SEQ ID NO: 358459 - DNA, 25 bp, Artificial
  Probe
atacacctggacctggccatgcaag

SEQ ID NO: 358460 - DNA, 25 bp, Artificial
  Probe
gaacatttttggtttagctcttcct

SEQ ID NO: 358461 - DNA, 25 bp, Artificial
  Probe
catacacctggacctggccatgcaa

SEQ ID NO: 358462 - DNA, 25 bp, Artificial
  Probe
ggaatcattaaaactctgcttagat

SEQ ID NO: 358463 - DNA, 25 bp, Artificial
  Probe
gtctgctttccacagcacatttttg

SEQ ID NO: 358464 - DNA, 25 bp, Artificial
  Probe
tgagtcccaagacaattttggagat

SEQ ID NO: 358465 - DNA, 25 bp, Artificial
  Probe
ctgtcagcagagcatacacctggac

SEQ ID NO: 358466 - DNA, 25 bp, Artificial
  Probe
gaaagaacaagctctgtctccccat

SEQ ID NO: 358467 - DNA, 25 bp, Artificial
  Probe
ttcattccttcctggcgagaaactg

SEQ ID NO: 358468 - DNA, 25 bp, Artificial
  Probe
atatatttcattccttcctggcgag

SEQ ID NO: 358469 - DNA, 25 bp, Artificial
  Probe
cagctggaagcgtttccatgctcta

SEQ ID NO: 358470 - DNA, 25 bp, Artificial
  Probe
ccagctgtcagcagagcatacacct

SEQ ID NO: 358471 - DNA, 25 bp, Artificial
  Probe
gaatcattaaaactctgcttagatg

SEQ ID NO: 358472 - DNA, 25 bp, Artificial
  Probe
tttcctgcagtcctcgctatccaga

SEQ ID NO: 358473 - DNA, 25 bp, Artificial
  Probe
gatctttcctgcagtcctcgctatc

SEQ ID NO: 358474 - DNA, 25 bp, Artificial
  Probe
actgtatccagcagctagcccaggc

SEQ ID NO: 358475 - DNA, 25 bp, Artificial
  Probe
aggctgctcagaagtatgaggcact

SEQ ID NO: 358476 - DNA, 25 bp, Artificial
  Probe
cgccttgtaacctttattggtgttg

SEQ ID NO: 358477 - DNA, 25 bp, Artificial
  Probe
aagatgccatgagcttgctgaatcc

SEQ ID NO: 358478 - DNA, 25 bp, Artificial
  Probe
tgcctactctgtatttatgaccaag

SEQ ID NO: 358479 - DNA, 25 bp, Artificial
  Probe
tgggggactctctgaagctgtgcaa

SEQ ID NO: 358480 - DNA, 25 bp, Artificial
  Probe
tatttcccctgaagacttcccaagg

SEQ ID NO: 358481 - DNA, 25 bp, Artificial
  Probe
ggaaaacctgggtccccgctatgct

SEQ ID NO: 358482 - DNA, 25 bp, Artificial
  Probe
tcaagcggaccagctccatggactc

SEQ ID NO: 358483 - DNA, 25 bp, Artificial
  Probe
agccagcctcatgatggtgcctggg

SEQ ID NO: 358484 - DNA, 25 bp, Artificial
  Probe
cggctcaagcggaccagctccatgg

SEQ ID NO: 358485 - DNA, 25 bp, Artificial
  Probe
tgagggccagaacatgctgatggtc

SEQ ID NO: 358486 - DNA, 25 bp, Artificial
  Probe
tggaattgctggatgcagtgagcca

SEQ ID NO: 358487 - DNA, 25 bp, Artificial
  Probe
tggtccttttgttccttgcccctgt

SEQ ID NO: 358488 - DNA, 25 bp, Artificial
  Probe
catcaactttatagcagaatcagtg

SEQ ID NO: 358489 - DNA, 25 bp, Artificial
  Probe
ctgtatttatgaccaagttcgttgt

SEQ ID NO: 358490 - DNA, 25 bp, Artificial
  Probe
cttgatgccttcaggctaaaacctc

SEQ ID NO: 358491 - DNA, 25 bp, Artificial
  Probe
ctagggttctgtagcctctcacctt

SEQ ID NO: 358492 - DNA, 25 bp, Artificial
  Probe
tcctaaattgatcttagagggctgg

SEQ ID NO: 358493 - DNA, 25 bp, Artificial
  Probe
atacctttggcctcatcgctgatct

SEQ ID NO: 358494 - DNA, 25 bp, Artificial
  Probe
gtccctgaggaggacctggcaccag

SEQ ID NO: 358495 - DNA, 25 bp, Artificial
  Probe
ctctggttcacatccgtgtatgggg

SEQ ID NO: 358496 - DNA, 25 bp, Artificial
  Probe
ctccaagggccgtgacagggacttt

SEQ ID NO: 358497 - DNA, 25 bp, Artificial
  Probe
aggaagagccactgtggcagtgtcc

SEQ ID NO: 358498 - DNA, 25 bp, Artificial
  Probe
tatgcttaaatgtcatgtgtttcgc

SEQ ID NO: 358499 - DNA, 25 bp, Artificial
  Probe
gtaggactcagtggagaagctgctt

SEQ ID NO: 358500 - DNA, 25 bp, Artificial
  Probe
cggggtgtcttctcatttcttgatg

SEQ ID NO: 358501 - DNA, 25 bp, Artificial
  Probe
gaaaccggagccagcctcatgatgg

SEQ ID NO: 358502 - DNA, 25 bp, Artificial
  Probe
agccctgacaattggctctacctca

SEQ ID NO: 358503 - DNA, 25 bp, Artificial
  Probe
cctttattggtgttggccatgatcc

SEQ ID NO: 358504 - DNA, 25 bp, Artificial
  Probe
gcaccactttcctttggtccttttg

SEQ ID NO: 358505 - DNA, 25 bp, Artificial
  Probe
atcttgtcagagagggtaggactca

SEQ ID NO: 358506 - DNA, 25 bp, Artificial
  Probe
tttatatggatgactgagaggccct

SEQ ID NO: 358507 - DNA, 25 bp, Artificial
  Probe
ttggtaccctcactggccgtgggga

SEQ ID NO: 358508 - DNA, 25 bp, Artificial
  Probe
tagtggcctcagcagctcggggtaa

SEQ ID NO: 358509 - DNA, 25 bp, Artificial
  Probe
gaaagaggctctatactcttccagt

SEQ ID NO: 358510 - DNA, 25 bp, Artificial
  Probe
gcagctttctggtgccaacctcatg

SEQ ID NO: 358511 - DNA, 25 bp, Artificial
  Probe
aacatgctgatggtcctgaaaaaag

SEQ ID NO: 358512 - DNA, 25 bp, Artificial
  Probe
ctgtccagccctgacaattggctct

SEQ ID NO: 358513 - DNA, 25 bp, Artificial
  Probe
caaagccatgggtatggatgtgctg

SEQ ID NO: 358514 - DNA, 25 bp, Artificial
  Probe
ggtgctggagcagctcctcgaaagc

SEQ ID NO: 358515 - DNA, 25 bp, Artificial
  Probe
tgctggagcagctcctcgaaagcgg

SEQ ID NO: 358516 - DNA, 25 bp, Artificial
  Probe
catatgtcctaaattgatcttagag

SEQ ID NO: 358517 - DNA, 25 bp, Artificial
  Probe
gctgcttgttgttccccagatccta

SEQ ID NO: 358518 - DNA, 25 bp, Artificial
  Probe
ctattcaggcagaggctggtgcaga

SEQ ID NO: 358519 - DNA, 25 bp, Artificial
  Probe
atgtgctgaatgaggccattggtac

SEQ ID NO: 358520 - DNA, 25 bp, Artificial
  Probe
agcctggggacaaggaaagaagatc

SEQ ID NO: 358521 - DNA, 25 bp, Artificial
  Probe
gccagaacctgaagaaacatctaag

SEQ ID NO: 358522 - DNA, 25 bp, Artificial
  Probe
accactattgccagaacctgaagaa

SEQ ID NO: 358523 - DNA, 25 bp, Artificial
  Probe
agccctgcaggctctgtcagattca

SEQ ID NO: 358524 - DNA, 25 bp, Artificial
  Probe
taggcaagccaaacaagtcaaagag

SEQ ID NO: 358525 - DNA, 25 bp, Artificial
  Probe
cgtagtgccagatgatgctgtagaa

SEQ ID NO: 358526 - DNA, 25 bp, Artificial
  Probe
cactattgccagaacctgaagaaac

SEQ ID NO: 358527 - DNA, 25 bp, Artificial
  Probe
atgctgtagaaaccttggctagaag

SEQ ID NO: 358528 - DNA, 25 bp, Artificial
  Probe
atgatgctgtagaaaccttggctag

SEQ ID NO: 358529 - DNA, 25 bp, Artificial
  Probe
gaaacatctaagtgcctgagtgagt

SEQ ID NO: 358530 - DNA, 25 bp, Artificial
  Probe
gaaaccttggctagaagcctgggga

SEQ ID NO: 358531 - DNA, 25 bp, Artificial
  Probe
gccatcttaggcaagccaaacaagt

SEQ ID NO: 358532 - DNA, 25 bp, Artificial
  Probe
agctttcagcagattttgtccaacc

SEQ ID NO: 358533 - DNA, 25 bp, Artificial
  Probe
agtcagagctgattggggagctttc

SEQ ID NO: 358534 - DNA, 25 bp, Artificial
  Probe
gattcactgggcacccggcagccag

SEQ ID NO: 358535 - DNA, 25 bp, Artificial
  Probe
cagagccatcttaggcaagccaaac

SEQ ID NO: 358536 - DNA, 25 bp, Artificial
  Probe
tgatgctgtagaaaccttggctaga

SEQ ID NO: 358537 - DNA, 25 bp, Artificial
  Probe
ttgccagaacctgaagaaacatcta

SEQ ID NO: 358538 - DNA, 25 bp, Artificial
  Probe
cttaggcaagccaaacaagtcaaag

SEQ ID NO: 358539 - DNA, 25 bp, Artificial
  Probe
cctcagagccatcttaggcaagcca

SEQ ID NO: 358540 - DNA, 25 bp, Artificial
  Probe
accttggctagaagcctggggacaa

SEQ ID NO: 358541 - DNA, 25 bp, Artificial
  Probe
accctcagagccatcttaggcaagc

SEQ ID NO: 358542 - DNA, 25 bp, Artificial
  Probe
gcaagccaaacaagtcaaagaggca

SEQ ID NO: 358543 - DNA, 25 bp, Artificial
  Probe
agccagaccctcagagccatcttag

SEQ ID NO: 358544 - DNA, 25 bp, Artificial
  Probe
ccatcttaggcaagccaaacaagtc

SEQ ID NO: 358545 - DNA, 25 bp, Artificial
  Probe
atcaagccctgcaggctctgtcaga

SEQ ID NO: 358546 - DNA, 25 bp, Artificial
  Probe
aaccttggctagaagcctggggaca

SEQ ID NO: 358547 - DNA, 25 bp, Artificial
  Probe
ctgtagaaaccttggctagaagcct

SEQ ID NO: 358548 - DNA, 25 bp, Artificial
  Probe
agaacctgaagaaacatctaagtgc

SEQ ID NO: 358549 - DNA, 25 bp, Artificial
  Probe
tacaggttaaaaccagccaaggata

SEQ ID NO: 358550 - DNA, 25 bp, Artificial
  Probe
acctgctgagtacaggttaaaacca

SEQ ID NO: 358551 - DNA, 25 bp, Artificial
  Probe
catctaagtgcctgagtgagtcaga

SEQ ID NO: 358552 - DNA, 25 bp, Artificial
  Probe
tgcctgagtgagtcagagctgattg

SEQ ID NO: 358553 - DNA, 25 bp, Artificial
  Probe
ggaaaaccactattgccagaacctg

SEQ ID NO: 358554 - DNA, 25 bp, Artificial
  Probe
tagtgccagatgatgctgtagaaac

SEQ ID NO: 358555 - DNA, 25 bp, Artificial
  Probe
ctgattggggagctttcagcagatt

SEQ ID NO: 358556 - DNA, 25 bp, Artificial
  Probe
catgaatgatcaagccctgcaggct

SEQ ID NO: 358557 - DNA, 25 bp, Artificial
  Probe
ggagctttcagcagattttgtccaa

SEQ ID NO: 358558 - DNA, 25 bp, Artificial
  Probe
gcgtagtgccagatgatgctgtaga

SEQ ID NO: 358559 - DNA, 25 bp, Artificial
  Probe
gtcagagctgattggggagctttca

SEQ ID NO: 358560 - DNA, 25 bp, Artificial
  Probe
agctgattggggagctttcagcaga

SEQ ID NO: 358561 - DNA, 25 bp, Artificial
  Probe
ctctgtcagattcactgggcacccg

SEQ ID NO: 358562 - DNA, 25 bp, Artificial
  Probe
atggaaaaccactattgccagaacc

SEQ ID NO: 358563 - DNA, 25 bp, Artificial
  Probe
ggacacagtacctgctgagtacagg

SEQ ID NO: 358564 - DNA, 25 bp, Artificial
  Probe
gtgccagatgatgctgtagaaacct

SEQ ID NO: 358565 - DNA, 25 bp, Artificial
  Probe
gccagaccctcagagccatcttagg

SEQ ID NO: 358566 - DNA, 25 bp, Artificial
  Probe
gttcatctttggaccctcttagtta

SEQ ID NO: 358567 - DNA, 25 bp, Artificial
  Probe
gtgtctccatttaggcaacacatca

SEQ ID NO: 358568 - DNA, 25 bp, Artificial
  Probe
aggcaaagtctgatctctagataat

SEQ ID NO: 358569 - DNA, 25 bp, Artificial
  Probe
ctttggaccctcttagttacaaatg

SEQ ID NO: 358570 - DNA, 25 bp, Artificial
  Probe
ccaggatttctgcatgggaaaatgg

SEQ ID NO: 358571 - DNA, 25 bp, Artificial
  Probe
tcagagactttctgccaatacttag

SEQ ID NO: 358572 - DNA, 25 bp, Artificial
  Probe
tgccagctaaatccatggcagtgtc

SEQ ID NO: 358573 - DNA, 25 bp, Artificial
  Probe
ctggttttctgtagttataaccatt

SEQ ID NO: 358574 - DNA, 25 bp, Artificial
  Probe
gagagatacacaagcttctctccat

SEQ ID NO: 358575 - DNA, 25 bp, Artificial
  Probe
aggtctagaatgtgccactctatat

SEQ ID NO: 358576 - DNA, 25 bp, Artificial
  Probe
attgacttaacatctctgtagccag

SEQ ID NO: 358577 - DNA, 25 bp, Artificial
  Probe
aggttctcacagtgccagtccgcaa

SEQ ID NO: 358578 - DNA, 25 bp, Artificial
  Probe
gtctgatctctagataattgactta

SEQ ID NO: 358579 - DNA, 25 bp, Artificial
  Probe
ctcactagctactgtcctgagggag

SEQ ID NO: 358580 - DNA, 25 bp, Artificial
  Probe
cttgccagctaaatccatggcagtg

SEQ ID NO: 358581 - DNA, 25 bp, Artificial
  Probe
gtcacccacttgtccagtatttgtc

SEQ ID NO: 358582 - DNA, 25 bp, Artificial
  Probe
atcctatggaccagggctgcagatt

SEQ ID NO: 358583 - DNA, 25 bp, Artificial
  Probe
ctgcagatttgattctacaggtaga

SEQ ID NO: 358584 - DNA, 25 bp, Artificial
  Probe
ccaaggtcacccacttgtccagtat

SEQ ID NO: 358585 - DNA, 25 bp, Artificial
  Probe
atcatcccctgaccaggatttctgc

SEQ ID NO: 358586 - DNA, 25 bp, Artificial
  Probe
gtagttataaccattggttcatcat

SEQ ID NO: 358587 - DNA, 25 bp, Artificial
  Probe
tccaggtctgtcaaatgaatcctat

SEQ ID NO: 358588 - DNA, 25 bp, Artificial
  Probe
acagtggacacagtgaagatcagag

SEQ ID NO: 358589 - DNA, 25 bp, Artificial
  Probe
tacttagaaatacgtttccaggtga

SEQ ID NO: 358590 - DNA, 25 bp, Artificial
  Probe
accattggttcatcatcatatgatg

SEQ ID NO: 358591 - DNA, 25 bp, Artificial
  Probe
acttagagattttgatcctgaagcc

SEQ ID NO: 358592 - DNA, 25 bp, Artificial
  Probe
tgacttaacatctctgtagccagaa

SEQ ID NO: 358593 - DNA, 25 bp, Artificial
  Probe
aatagactgagcagctactgtgaac

SEQ ID NO: 358594 - DNA, 25 bp, Artificial
  Probe
atctctgtagccagaacaccatttg

SEQ ID NO: 358595 - DNA, 25 bp, Artificial
  Probe
ttaagcccaaggtcacccacttgtc

SEQ ID NO: 358596 - DNA, 25 bp, Artificial
  Probe
catatgatgctctcacagactctga

SEQ ID NO: 358597 - DNA, 25 bp, Artificial
  Probe
gctgttgactaccttgtaggtagta

SEQ ID NO: 358598 - DNA, 25 bp, Artificial
  Probe
ccagggctgcagatttgattctaca

SEQ ID NO: 358599 - DNA, 25 bp, Artificial
  Probe
tgggaattcctcagtattgtgtgtc

SEQ ID NO: 358600 - DNA, 25 bp, Artificial
  Probe
gatcctgaagcctacttcagctcca

SEQ ID NO: 358601 - DNA, 25 bp, Artificial
  Probe
ctcttagttacaaatgatcagtgac

SEQ ID NO: 358602 - DNA, 25 bp, Artificial
  Probe
gtctgtcaaatgaatcctatggacc

SEQ ID NO: 358603 - DNA, 25 bp, Artificial
  Probe
ggttcatcatcatatgatgctctca

SEQ ID NO: 358604 - DNA, 25 bp, Artificial
  Probe
ctgtagccagaacaccatttgcaaa

SEQ ID NO: 358605 - DNA, 25 bp, Artificial
  Probe
accattcagttcagttcatctttgg

SEQ ID NO: 358606 - DNA, 25 bp, Artificial
  Probe
gtgccagtccgcaagcacacttaga

SEQ ID NO: 358607 - DNA, 25 bp, Artificial
  Probe
attccaactccaggtctgtcaaatg

SEQ ID NO: 358608 - DNA, 25 bp, Artificial
  Probe
aaatgatcagtgacatctcactagc

SEQ ID NO: 358609 - DNA, 25 bp, Artificial
  Probe
aagccatatcacagtttaaggaatt

SEQ ID NO: 358610 - DNA, 25 bp, Artificial
  Probe
aaagtctgatctctagataattgac

SEQ ID NO: 358611 - DNA, 25 bp, Artificial
  Probe
cttagaaatacgtttccaggtgaga

SEQ ID NO: 358612 - DNA, 25 bp, Artificial
  Probe
ccggtagaggacacgcaaggcgcca

SEQ ID NO: 358613 - DNA, 25 bp, Artificial
  Probe
tcagctccgccttcggtcaggatag

SEQ ID NO: 358614 - DNA, 25 bp, Artificial
  Probe
tcgccaagagcgagtccaagacgtc

SEQ ID NO: 358615 - DNA, 25 bp, Artificial
  Probe
ccggatgatgtctcgctgaggccgc

SEQ ID NO: 358616 - DNA, 25 bp, Artificial
  Probe
tgtccggatgatgtctcgctgaggc

SEQ ID NO: 358617 - DNA, 25 bp, Artificial
  Probe
gtgccaagccggtagaggacacgca

SEQ ID NO: 358618 - DNA, 25 bp, Artificial
  Probe
acgcaaggcgccaagtgccatctgc

SEQ ID NO: 358619 - DNA, 25 bp, Artificial
  Probe
caactcctgcaactggaaaaggggg

SEQ ID NO: 358620 - DNA, 25 bp, Artificial
  Probe
ctccgccttcggtcaggatagatcg

SEQ ID NO: 358621 - DNA, 25 bp, Artificial
  Probe
gtgaaagactcacaactcctgcaac

SEQ ID NO: 358622 - DNA, 25 bp, Artificial
  Probe
tcgcacatcgccaagagcgagtcca

SEQ ID NO: 358623 - DNA, 25 bp, Artificial
  Probe
caagacgtcgctgctcaaggcggcg

SEQ ID NO: 358624 - DNA, 25 bp, Artificial
  Probe
gtagctgccgagagcccaggatgta

SEQ ID NO: 358625 - DNA, 25 bp, Artificial
  Probe
gactcacaactcctgcaactggaaa

SEQ ID NO: 358626 - DNA, 25 bp, Artificial
  Probe
aggaggccacagtgccaagccggta

SEQ ID NO: 358627 - DNA, 25 bp, Artificial
  Probe
tgccccgagggcagagcctttcagc

SEQ ID NO: 358628 - DNA, 25 bp, Artificial
  Probe
aggggctcctccaggtctgccaact

SEQ ID NO: 358629 - DNA, 25 bp, Artificial
  Probe
ccaagagcgagtccaagacgtcgct

SEQ ID NO: 358630 - DNA, 25 bp, Artificial
  Probe
gcgagtccaagacgtcgctgctcaa

SEQ ID NO: 358631 - DNA, 25 bp, Artificial
  Probe
gctggcgccggctctcagtctacgg

SEQ ID NO: 358632 - DNA, 25 bp, Artificial
  Probe
tagaggacacgcaaggcgccaagtg

SEQ ID NO: 358633 - DNA, 25 bp, Artificial
  Probe
ttcggtcaggatagatcgttacgac

SEQ ID NO: 358634 - DNA, 25 bp, Artificial
  Probe
aggtctgccaactcccacaggcggg

SEQ ID NO: 358635 - DNA, 25 bp, Artificial
  Probe
gccacagtgccaagccggtagagga

SEQ ID NO: 358636 - DNA, 25 bp, Artificial
  Probe
ggctctcagtctacggggctccctg

SEQ ID NO: 358637 - DNA, 25 bp, Artificial
  Probe
tgccgagagcccaggatgtactggc

SEQ ID NO: 358638 - DNA, 25 bp, Artificial
  Probe
ctgtgaaagactcacaactcctgca

SEQ ID NO: 358639 - DNA, 25 bp, Artificial
  Probe
cgctgaggggctcctccaggtctgc

SEQ ID NO: 358640 - DNA, 25 bp, Artificial
  Probe
gccaagccggtagaggacacgcaag

SEQ ID NO: 358641 - DNA, 25 bp, Artificial
  Probe
ctcacaactcctgcaactggaaaag

SEQ ID NO: 358642 - DNA, 25 bp, Artificial
  Probe
gcgccggctctcagtctacggggct

SEQ ID NO: 358643 - DNA, 25 bp, Artificial
  Probe
atgatgtctcgctgaggccgctgag

SEQ ID NO: 358644 - DNA, 25 bp, Artificial
  Probe
atgagctcgcacatcgccaagagcg

SEQ ID NO: 358645 - DNA, 25 bp, Artificial
  Probe
ctggcgccggctctcagtctacggg

SEQ ID NO: 358646 - DNA, 25 bp, Artificial
  Probe
cgagtccaagacgtcgctgctcaag

SEQ ID NO: 358647 - DNA, 25 bp, Artificial
  Probe
agtctacggggctccctgcgatcgc

SEQ ID NO: 358648 - DNA, 25 bp, Artificial
  Probe
cagtagctgccgagagcccaggatg

SEQ ID NO: 358649 - DNA, 25 bp, Artificial
  Probe
ccaagacgtcgctgctcaaggcggc

SEQ ID NO: 358650 - DNA, 25 bp, Artificial
  Probe
cacatcgccaagagcgagtccaaga

SEQ ID NO: 358651 - DNA, 25 bp, Artificial
  Probe
ctgaggccgctgaggggctcctcca

SEQ ID NO: 358652 - DNA, 25 bp, Artificial
  Probe
ccgctgaggggctcctccaggtctg

SEQ ID NO: 358653 - DNA, 25 bp, Artificial
  Probe
tgagctcgcacatcgccaagagcga

SEQ ID NO: 358654 - DNA, 25 bp, Artificial
  Probe
gaaagactcacaactcctgcaactg

SEQ ID NO: 358655 - DNA, 25 bp, Artificial
  Probe
agaggacacgcaaggcgccaagtgc

SEQ ID NO: 358656 - DNA, 25 bp, Artificial
  Probe
cgatgagctcgcacatcgccaagag

SEQ ID NO: 358657 - DNA, 25 bp, Artificial
  Probe
caagccggtagaggacacgcaaggc

SEQ ID NO: 358658 - DNA, 25 bp, Artificial
  Probe
gtacttctgtggaaaacaatttgca

SEQ ID NO: 358659 - DNA, 25 bp, Artificial
  Probe
actcttcagaggaaaccggatgctg

SEQ ID NO: 358660 - DNA, 25 bp, Artificial
  Probe
tattgccgtcctggactctgtgagc

SEQ ID NO: 358661 - DNA, 25 bp, Artificial
  Probe
tttattgccgtcctggactctgtga

SEQ ID NO: 358662 - DNA, 25 bp, Artificial
  Probe
gagcgtgtccgcagagccgtagtaa

SEQ ID NO: 358663 - DNA, 25 bp, Artificial
  Probe
ccgcagagccgtagtaaatattgtg

SEQ ID NO: 358664 - DNA, 25 bp, Artificial
  Probe
ggaaaccggatgctgaagtgcagtc

SEQ ID NO: 358665 - DNA, 25 bp, Artificial
  Probe
taaactcttcagaggaaaccggatg

SEQ ID NO: 358666 - DNA, 25 bp, Artificial
  Probe
tatttaaactcttcagaggaaaccg

SEQ ID NO: 358667 - DNA, 25 bp, Artificial
  Probe
aactcttcagaggaaaccggatgct

SEQ ID NO: 358668 - DNA, 25 bp, Artificial
  Probe
gatgctgaagtgcagtcccagcaca

SEQ ID NO: 358669 - DNA, 25 bp, Artificial
  Probe
cctggactctgtgagcgtgtccgca

SEQ ID NO: 358670 - DNA, 25 bp, Artificial
  Probe
ctggactctgtgagcgtgtccgcag

SEQ ID NO: 358671 - DNA, 25 bp, Artificial
  Probe
ttgccgtcctggactctgtgagcgt

SEQ ID NO: 358672 - DNA, 25 bp, Artificial
  Probe
tttttaggcaaacctcgactcgacg

SEQ ID NO: 358673 - DNA, 25 bp, Artificial
  Probe
tgctgaagtgcagtcccagcacact

SEQ ID NO: 358674 - DNA, 25 bp, Artificial
  Probe
ttattgccgtcctggactctgtgag

SEQ ID NO: 358675 - DNA, 25 bp, Artificial
  Probe
gctgaagtgcagtcccagcacactt

SEQ ID NO: 358676 - DNA, 25 bp, Artificial
  Probe
ccgtcctggactctgtgagcgtgtc

SEQ ID NO: 358677 - DNA, 25 bp, Artificial
  Probe
gcaaacctcgactcgacgtatttta

SEQ ID NO: 358678 - DNA, 25 bp, Artificial
  Probe
tgccgtcctggactctgtgagcgtg

SEQ ID NO: 358679 - DNA, 25 bp, Artificial
  Probe
tccgcagagccgtagtaaatattgt

SEQ ID NO: 358680 - DNA, 25 bp, Artificial
  Probe
ttaggcaaacctcgactcgacgtat

SEQ ID NO: 358681 - DNA, 25 bp, Artificial
  Probe
aaactcttcagaggaaaccggatgc

SEQ ID NO: 358682 - DNA, 25 bp, Artificial
  Probe
gcgtgtccgcagagccgtagtaaat

SEQ ID NO: 358683 - DNA, 25 bp, Artificial
  Probe
actctgtgagcgtgtccgcagagcc

SEQ ID NO: 358684 - DNA, 25 bp, Artificial
  Probe
agaggaaaccggatgctgaagtgca

SEQ ID NO: 358685 - DNA, 25 bp, Artificial
  Probe
attgccgtcctggactctgtgagcg

SEQ ID NO: 358686 - DNA, 25 bp, Artificial
  Probe
ggcaaacctcgactcgacgtatttt

SEQ ID NO: 358687 - DNA, 25 bp, Artificial
  Probe
aggaaaccggatgctgaagtgcagt

SEQ ID NO: 358688 - DNA, 25 bp, Artificial
  Probe
tctgtgagcgtgtccgcagagccgt

SEQ ID NO: 358689 - DNA, 25 bp, Artificial
  Probe
aaaccggatgctgaagtgcagtccc

SEQ ID NO: 358690 - DNA, 25 bp, Artificial
  Probe
agcgtgtccgcagagccgtagtaaa

SEQ ID NO: 358691 - DNA, 25 bp, Artificial
  Probe
cgtcctggactctgtgagcgtgtcc

SEQ ID NO: 358692 - DNA, 25 bp, Artificial
  Probe
tacttctgtggaaaacaatttgcat

SEQ ID NO: 358693 - DNA, 25 bp, Artificial
  Probe
tcctggactctgtgagcgtgtccgc

SEQ ID NO: 358694 - DNA, 25 bp, Artificial
  Probe
tttaggcaaacctcgactcgacgta

SEQ ID NO: 358695 - DNA, 25 bp, Artificial
  Probe
ttttaggcaaacctcgactcgacgt

SEQ ID NO: 358696 - DNA, 25 bp, Artificial
  Probe
tgtacttctgtggaaaacaatttgc

SEQ ID NO: 358697 - DNA, 25 bp, Artificial
  Probe
tcttcagaggaaaccggatgctgaa

SEQ ID NO: 358698 - DNA, 25 bp, Artificial
  Probe
ctctgtgagcgtgtccgcagagccg

SEQ ID NO: 358699 - DNA, 25 bp, Artificial
  Probe
aatttattgccgtcctggactctgt

SEQ ID NO: 358700 - DNA, 25 bp, Artificial
  Probe
aaccggatgctgaagtgcagtccca

SEQ ID NO: 358701 - DNA, 25 bp, Artificial
  Probe
atgctgaagtgcagtcccagcacac

SEQ ID NO: 358702 - DNA, 25 bp, Artificial
  Probe
gccgtcctggactctgtgagcgtgt

SEQ ID NO: 358703 - DNA, 25 bp, Artificial
  Probe
ttaaactcttcagaggaaaccggat

SEQ ID NO: 358704 - DNA, 25 bp, Artificial
  Probe
gattctcagagtggttgactccctc

SEQ ID NO: 358705 - DNA, 25 bp, Artificial
  Probe
agcaaggacatcaatgcttacaatg

SEQ ID NO: 358706 - DNA, 25 bp, Artificial
  Probe
catgcccgtgacagcccgtgtggta

SEQ ID NO: 358707 - DNA, 25 bp, Artificial
  Probe
gctgcagttccgtagaaagattgtg

SEQ ID NO: 358708 - DNA, 25 bp, Artificial
  Probe
ggcgccagagtttgccaagaggaat

SEQ ID NO: 358709 - DNA, 25 bp, Artificial
  Probe
ggtgcagcacccacagaaaagctac

SEQ ID NO: 358710 - DNA, 25 bp, Artificial
  Probe
ttggccctgacaagaaactaaaact

SEQ ID NO: 358711 - DNA, 25 bp, Artificial
  Probe
ttgaggccaataccaccatcggcca

SEQ ID NO: 358712 - DNA, 25 bp, Artificial
  Probe
aaagctggcgccagagtttgccaag

SEQ ID NO: 358713 - DNA, 25 bp, Artificial
  Probe
ggccctgacaagaaactaaaactgt

SEQ ID NO: 358714 - DNA, 25 bp, Artificial
  Probe
ctccagctgacagcatcaaatccag

SEQ ID NO: 358715 - DNA, 25 bp, Artificial
  Probe
gagctgcaaagctggcgccagagtt

SEQ ID NO: 358716 - DNA, 25 bp, Artificial
  Probe
cttccacgatttcctaggagattca

SEQ ID NO: 358717 - DNA, 25 bp, Artificial
  Probe
agggaccttgccatcctgttgggca

SEQ ID NO: 358718 - DNA, 25 bp, Artificial
  Probe
catgttggatccagcagagaaggat

SEQ ID NO: 358719 - DNA, 25 bp, Artificial
  Probe
atgaaaaaggcatgcccgtgacagc

SEQ ID NO: 358720 - DNA, 25 bp, Artificial
  Probe
cgtgacagcccgtgtggtattcatt

SEQ ID NO: 358721 - DNA, 25 bp, Artificial
  Probe
gcagcacccacagaaaagctaccat

SEQ ID NO: 358722 - DNA, 25 bp, Artificial
  Probe
catttttggccctgacaagaaacta

SEQ ID NO: 358723 - DNA, 25 bp, Artificial
  Probe
atcgacgataaggacagggaccttg

SEQ ID NO: 358724 - DNA, 25 bp, Artificial
  Probe
taagttgattgctctttcaatagac

SEQ ID NO: 358725 - DNA, 25 bp, Artificial
  Probe
gacagcatcaaatccagttgccact

SEQ ID NO: 358726 - DNA, 25 bp, Artificial
  Probe
tggcaagaaatacctccgttatacg

SEQ ID NO: 358727 - DNA, 25 bp, Artificial
  Probe
acatccgcttccacgatttcctagg

SEQ ID NO: 358728 - DNA, 25 bp, Artificial
  Probe
cagctgacagctgcagttccgtaga

SEQ ID NO: 358729 - DNA, 25 bp, Artificial
  Probe
ttgccatcctgttgggcatgttgga

SEQ ID NO: 358730 - DNA, 25 bp, Artificial
  Probe
gacagctgcagttccgtagaaagat

SEQ ID NO: 358731 - DNA, 25 bp, Artificial
  Probe
aaggcatgcccgtgacagcccgtgt

SEQ ID NO: 358732 - DNA, 25 bp, Artificial
  Probe
ggtattcatttttggccctgacaag

SEQ ID NO: 358733 - DNA, 25 bp, Artificial
  Probe
aatccagttgccactccagttgact

SEQ ID NO: 358734 - DNA, 25 bp, Artificial
  Probe
tgcttctcggggacgaagcccccaa

SEQ ID NO: 358735 - DNA, 25 bp, Artificial
  Probe
tgcctggagcaaggacatcaatgct

SEQ ID NO: 358736 - DNA, 25 bp, Artificial
  Probe
aggacagggaccttgccatcctgtt

SEQ ID NO: 358737 - DNA, 25 bp, Artificial
  Probe
atcctgttgggcatgttggatccag

SEQ ID NO: 358738 - DNA, 25 bp, Artificial
  Probe
acagaacttggcagagctgcaaagc

SEQ ID NO: 358739 - DNA, 25 bp, Artificial
  Probe
ggactttaccccagtgtgcaccaca

SEQ ID NO: 358740 - DNA, 25 bp, Artificial
  Probe
aactttgaggccaataccaccatcg

SEQ ID NO: 358741 - DNA, 25 bp, Artificial
  Probe
ccatttcccatcatcgacgataagg

SEQ ID NO: 358742 - DNA, 25 bp, Artificial
  Probe
ccacgggactttaccccagtgtgca

SEQ ID NO: 358743 - DNA, 25 bp, Artificial
  Probe
atccagttgccactccagttgactg

SEQ ID NO: 358744 - DNA, 25 bp, Artificial
  Probe
tgaggaccattttgcctggagcaag

SEQ ID NO: 358745 - DNA, 25 bp, Artificial
  Probe
ccagagtttgccaagaggaatgtta

SEQ ID NO: 358746 - DNA, 25 bp, Artificial
  Probe
gcatcaaatccagttgccactccag

SEQ ID NO: 358747 - DNA, 25 bp, Artificial
  Probe
atgagattctcagagtggttgactc

SEQ ID NO: 358748 - DNA, 25 bp, Artificial
  Probe
gaaatacctccgttatacgccccag

SEQ ID NO: 358749 - DNA, 25 bp, Artificial
  Probe
ataaggacagggaccttgccatcct

SEQ ID NO: 358750 - DNA, 25 bp, Artificial
  Probe
tgccgtgattacttggcaatctaga

SEQ ID NO: 358751 - DNA, 25 bp, Artificial
  Probe
gacatcctgtgttgggttttactgc

SEQ ID NO: 358752 - DNA, 25 bp, Artificial
  Probe
cttttgtgatggttgccgtgattac

SEQ ID NO: 358753 - DNA, 25 bp, Artificial
  Probe
gccgtgattacttggcaatctagat

SEQ ID NO: 358754 - DNA, 25 bp, Artificial
  Probe
tggttgccgtgattacttggcaatc

SEQ ID NO: 358755 - DNA, 25 bp, Artificial
  Probe
gatggttgccgtgattacttggcaa

SEQ ID NO: 358756 - DNA, 25 bp, Artificial
  Probe
aatctgaagctgctgagaacatacg

SEQ ID NO: 358757 - DNA, 25 bp, Artificial
  Probe
aagctgctgagaacatacggtccca

SEQ ID NO: 358758 - DNA, 25 bp, Artificial
  Probe
tcacatggtttcattacctgtgctc

SEQ ID NO: 358759 - DNA, 25 bp, Artificial
  Probe
tttactgcttttgtgatggttgccg

SEQ ID NO: 358760 - DNA, 25 bp, Artificial
  Probe
ggttgccgtgattacttggcaatct

SEQ ID NO: 358761 - DNA, 25 bp, Artificial
  Probe
acagcctgtcacatggtttcattac

SEQ ID NO: 358762 - DNA, 25 bp, Artificial
  Probe
ctggcaacagttttgaccagactct

SEQ ID NO: 358763 - DNA, 25 bp, Artificial
  Probe
ttacttggcaatctagattactttg

SEQ ID NO: 358764 - DNA, 25 bp, Artificial
  Probe
acatacggtcccaggctacatctgt

SEQ ID NO: 358765 - DNA, 25 bp, Artificial
  Probe
catggtttcattacctgtgctccca

SEQ ID NO: 358766 - DNA, 25 bp, Artificial
  Probe
tttgtaatctatctggcaacagttt

SEQ ID NO: 358767 - DNA, 25 bp, Artificial
  Probe
tggcaatctagattactttgtaatc

SEQ ID NO: 358768 - DNA, 25 bp, Artificial
  Probe
aatctatctggcaacagttttgacc

SEQ ID NO: 358769 - DNA, 25 bp, Artificial
  Probe
ctttgtaatctatctggcaacagtt

SEQ ID NO: 358770 - DNA, 25 bp, Artificial
  Probe
acatggtttcattacctgtgctccc

SEQ ID NO: 358771 - DNA, 25 bp, Artificial
  Probe
ctgcttttgtgatggttgccgtgat

SEQ ID NO: 358772 - DNA, 25 bp, Artificial
  Probe
agcacagcctgtcacatggtttcat

SEQ ID NO: 358773 - DNA, 25 bp, Artificial
  Probe
ctgaagctgctgagaacatacggtc

SEQ ID NO: 358774 - DNA, 25 bp, Artificial
  Probe
gagaacatacggtcccaggctacat

SEQ ID NO: 358775 - DNA, 25 bp, Artificial
  Probe
ttactgcttttgtgatggttgccgt

SEQ ID NO: 358776 - DNA, 25 bp, Artificial
  Probe
tctatctggcaacagttttgaccag

SEQ ID NO: 358777 - DNA, 25 bp, Artificial
  Probe
ctgtcacatggtttcattacctgtg

SEQ ID NO: 358778 - DNA, 25 bp, Artificial
  Probe
gattactttgtaatctatctggcaa

SEQ ID NO: 358779 - DNA, 25 bp, Artificial
  Probe
cctgtcacatggtttcattacctgt

SEQ ID NO: 358780 - DNA, 25 bp, Artificial
  Probe
tctgaagctgctgagaacatacggt

SEQ ID NO: 358781 - DNA, 25 bp, Artificial
  Probe
atggtttcattacctgtgctcccag

SEQ ID NO: 358782 - DNA, 25 bp, Artificial
  Probe
agctgctgagaacatacggtcccag

SEQ ID NO: 358783 - DNA, 25 bp, Artificial
  Probe
caacagttttgaccagactctgtgt

SEQ ID NO: 358784 - DNA, 25 bp, Artificial
  Probe
acagttttgaccagactctgtgtgt

SEQ ID NO: 358785 - DNA, 25 bp, Artificial
  Probe
tactttgtaatctatctggcaacag

SEQ ID NO: 358786 - DNA, 25 bp, Artificial
  Probe
tgattacttggcaatctagattact

SEQ ID NO: 358787 - DNA, 25 bp, Artificial
  Probe
gattacttggcaatctagattactt

SEQ ID NO: 358788 - DNA, 25 bp, Artificial
  Probe
ttgtaatctatctggcaacagtttt

SEQ ID NO: 358789 - DNA, 25 bp, Artificial
  Probe
tgatggttgccgtgattacttggca

SEQ ID NO: 358790 - DNA, 25 bp, Artificial
  Probe
tagattactttgtaatctatctggc

SEQ ID NO: 358791 - DNA, 25 bp, Artificial
  Probe
cttggcaatctagattactttgtaa

SEQ ID NO: 358792 - DNA, 25 bp, Artificial
  Probe
gttgccgtgattacttggcaatcta

SEQ ID NO: 358793 - DNA, 25 bp, Artificial
  Probe
gcaacagttttgaccagactctgtg

SEQ ID NO: 358794 - DNA, 25 bp, Artificial
  Probe
agcctgtcacatggtttcattacct

SEQ ID NO: 358795 - DNA, 25 bp, Artificial
  Probe
caagcacagcctgtcacatggtttc

SEQ ID NO: 358796 - DNA, 25 bp, Artificial
  Probe
gctctttctactcaaaaaccctctg

SEQ ID NO: 358797 - DNA, 25 bp, Artificial
  Probe
agtagctactgggctctttctactc

SEQ ID NO: 358798 - DNA, 25 bp, Artificial
  Probe
tctgtagctcaactgactatctagg

SEQ ID NO: 358799 - DNA, 25 bp, Artificial
  Probe
acaccctcctgagtagctactgggc

SEQ ID NO: 358800 - DNA, 25 bp, Artificial
  Probe
atacaccctcctgagtagctactgg

SEQ ID NO: 358801 - DNA, 25 bp, Artificial
  Probe
tttctactcaaaaaccctctgtagc

SEQ ID NO: 358802 - DNA, 25 bp, Artificial
  Probe
cctcctgagtagctactgggctctt

SEQ ID NO: 358803 - DNA, 25 bp, Artificial
  Probe
ctactgggctctttctactcaaaaa

SEQ ID NO: 358804 - DNA, 25 bp, Artificial
  Probe
ccctcctgagtagctactgggctct

SEQ ID NO: 358805 - DNA, 25 bp, Artificial
  Probe
atgaaggatacaccctcctgagtag

SEQ ID NO: 358806 - DNA, 25 bp, Artificial
  Probe
tacaccctcctgagtagctactggg

SEQ ID NO: 358807 - DNA, 25 bp, Artificial
  Probe
aaaaaccctctgtagctcaactgac

SEQ ID NO: 358808 - DNA, 25 bp, Artificial
  Probe
accctcctgagtagctactgggctc

SEQ ID NO: 358809 - DNA, 25 bp, Artificial
  Probe
gtagctactgggctctttctactca

SEQ ID NO: 358810 - DNA, 25 bp, Artificial
  Probe
tgggctctttctactcaaaaaccct

SEQ ID NO: 358811 - DNA, 25 bp, Artificial
  Probe
caaaaaccctctgtagctcaactga

SEQ ID NO: 358812 - DNA, 25 bp, Artificial
  Probe
tactcaaaaaccctctgtagctcaa

SEQ ID NO: 358813 - DNA, 25 bp, Artificial
  Probe
ctgtagctcaactgactatctaggg

SEQ ID NO: 358814 - DNA, 25 bp, Artificial
  Probe
ctactcaaaaaccctctgtagctca

SEQ ID NO: 358815 - DNA, 25 bp, Artificial
  Probe
cctgagtagctactgggctctttct

SEQ ID NO: 358816 - DNA, 25 bp, Artificial
  Probe
ttctactcaaaaaccctctgtagct

SEQ ID NO: 358817 - DNA, 25 bp, Artificial
  Probe
ggatacaccctcctgagtagctact

SEQ ID NO: 358818 - DNA, 25 bp, Artificial
  Probe
caccctcctgagtagctactgggct

SEQ ID NO: 358819 - DNA, 25 bp, Artificial
  Probe
ccctctgtagctcaactgactatct

SEQ ID NO: 358820 - DNA, 25 bp, Artificial
  Probe
gaaggatacaccctcctgagtagct

SEQ ID NO: 358821 - DNA, 25 bp, Artificial
  Probe
gagtagctactgggctctttctact

SEQ ID NO: 358822 - DNA, 25 bp, Artificial
  Probe
ctctgtagctcaactgactatctag

SEQ ID NO: 358823 - DNA, 25 bp, Artificial
  Probe
aaccctctgtagctcaactgactat

SEQ ID NO: 358824 - DNA, 25 bp, Artificial
  Probe
agctactgggctctttctactcaaa

SEQ ID NO: 358825 - DNA, 25 bp, Artificial
  Probe
tctttctactcaaaaaccctctgta

SEQ ID NO: 358826 - DNA, 25 bp, Artificial
  Probe
gatgaaggatacaccctcctgagta

SEQ ID NO: 358827 - DNA, 25 bp, Artificial
  Probe
accctctgtagctcaactgactatc

SEQ ID NO: 358828 - DNA, 25 bp, Artificial
  Probe
ctttctactcaaaaaccctctgtag

SEQ ID NO: 358829 - DNA, 25 bp, Artificial
  Probe
ctgagtagctactgggctctttcta

SEQ ID NO: 358830 - DNA, 25 bp, Artificial
  Probe
actcaaaaaccctctgtagctcaac

SEQ ID NO: 358831 - DNA, 25 bp, Artificial
  Probe
tcctgagtagctactgggctctttc

SEQ ID NO: 358832 - DNA, 25 bp, Artificial
  Probe
tagctactgggctctttctactcaa

SEQ ID NO: 358833 - DNA, 25 bp, Artificial
  Probe
aaaccctctgtagctcaactgacta

SEQ ID NO: 358834 - DNA, 25 bp, Artificial
  Probe
ggctctttctactcaaaaaccctct

SEQ ID NO: 358835 - DNA, 25 bp, Artificial
  Probe
gctactgggctctttctactcaaaa

SEQ ID NO: 358836 - DNA, 25 bp, Artificial
  Probe
tcaaaaaccctctgtagctcaactg

SEQ ID NO: 358837 - DNA, 25 bp, Artificial
  Probe
tgagtagctactgggctctttctac

SEQ ID NO: 358838 - DNA, 25 bp, Artificial
  Probe
ctcaaaaaccctctgtagctcaact

SEQ ID NO: 358839 - DNA, 25 bp, Artificial
  Probe
ctcctgagtagctactgggctcttt

SEQ ID NO: 358840 - DNA, 25 bp, Artificial
  Probe
tactgggctctttctactcaaaaac

SEQ ID NO: 358841 - DNA, 25 bp, Artificial
  Probe
aaggatacaccctcctgagtagcta

SEQ ID NO: 358842 - DNA, 25 bp, Artificial
  Probe
catcagactcagagtcaagtgcagg

SEQ ID NO: 358843 - DNA, 25 bp, Artificial
  Probe
tcagactcagagtcaagtgcaggag

SEQ ID NO: 358844 - DNA, 25 bp, Artificial
  Probe
gtgcatcttcaccaatgtgtgcgtc

SEQ ID NO: 358845 - DNA, 25 bp, Artificial
  Probe
acctcagtcatgagggccaccctga

SEQ ID NO: 358846 - DNA, 25 bp, Artificial
  Probe
gggccctagacatcagactcagagt

SEQ ID NO: 358847 - DNA, 25 bp, Artificial
  Probe
agacatcagactcagagtcaagtgc

SEQ ID NO: 358848 - DNA, 25 bp, Artificial
  Probe
tcggtgcatcttcaccaatgtgtgc

SEQ ID NO: 358849 - DNA, 25 bp, Artificial
  Probe
tgacctcagtcatgagggccaccct

SEQ ID NO: 358850 - DNA, 25 bp, Artificial
  Probe
cagactcagagtcaagtgcaggagg

SEQ ID NO: 358851 - DNA, 25 bp, Artificial
  Probe
tagacatcagactcagagtcaagtg

SEQ ID NO: 358852 - DNA, 25 bp, Artificial
  Probe
accactgggccctagacatcagact

SEQ ID NO: 358853 - DNA, 25 bp, Artificial
  Probe
gacatcagactcagagtcaagtgca

SEQ ID NO: 358854 - DNA, 25 bp, Artificial
  Probe
ggccctagacatcagactcagagtc

SEQ ID NO: 358855 - DNA, 25 bp, Artificial
  Probe
tgggctcaccactgggccctagaca

SEQ ID NO: 358856 - DNA, 25 bp, Artificial
  Probe
ggtgcatcttcaccaatgtgtgcgt

SEQ ID NO: 358857 - DNA, 25 bp, Artificial
  Probe
atcagactcagagtcaagtgcagga

SEQ ID NO: 358858 - DNA, 25 bp, Artificial
  Probe
ctgggccctagacatcagactcaga

SEQ ID NO: 358859 - DNA, 25 bp, Artificial
  Probe
ctagacatcagactcagagtcaagt

SEQ ID NO: 358860 - DNA, 25 bp, Artificial
  Probe
tatcggtgcatcttcaccaatgtgt

SEQ ID NO: 358861 - DNA, 25 bp, Artificial
  Probe
gacctcagtcatgagggccaccctg

SEQ ID NO: 358862 - DNA, 25 bp, Artificial
  Probe
actcagagtcaagtgcaggaggagc

SEQ ID NO: 358863 - DNA, 25 bp, Artificial
  Probe
cactgggccctagacatcagactca

SEQ ID NO: 358864 - DNA, 25 bp, Artificial
  Probe
gggctgacctcagtcatgagggcca

SEQ ID NO: 358865 - DNA, 25 bp, Artificial
  Probe
tgctggggctgacctcagtcatgag

SEQ ID NO: 358866 - DNA, 25 bp, Artificial
  Probe
gctgacctcagtcatgagggccacc

SEQ ID NO: 358867 - DNA, 25 bp, Artificial
  Probe
actgggccctagacatcagactcag

SEQ ID NO: 358868 - DNA, 25 bp, Artificial
  Probe
tgcatcttcaccaatgtgtgcgtcc

SEQ ID NO: 358869 - DNA, 25 bp, Artificial
  Probe
ggctgacctcagtcatgagggccac

SEQ ID NO: 358870 - DNA, 25 bp, Artificial
  Probe
ccctagacatcagactcagagtcaa

SEQ ID NO: 358871 - DNA, 25 bp, Artificial
  Probe
agactcagagtcaagtgcaggagga

SEQ ID NO: 358872 - DNA, 25 bp, Artificial
  Probe
tgggccctagacatcagactcagag

SEQ ID NO: 358873 - DNA, 25 bp, Artificial
  Probe
cggtgcatcttcaccaatgtgtgcg

SEQ ID NO: 358874 - DNA, 25 bp, Artificial
  Probe
gccctagacatcagactcagagtca

SEQ ID NO: 358875 - DNA, 25 bp, Artificial
  Probe
acatcagactcagagtcaagtgcag

SEQ ID NO: 358876 - DNA, 25 bp, Artificial
  Probe
atcggtgcatcttcaccaatgtgtg

SEQ ID NO: 358877 - DNA, 25 bp, Artificial
  Probe
tcaatccatatggtgaaggaggaca

SEQ ID NO: 358878 - DNA, 25 bp, Artificial
  Probe
cctagacatcagactcagagtcaag

SEQ ID NO: 358879 - DNA, 25 bp, Artificial
  Probe
caatccatatggtgaaggaggacag

SEQ ID NO: 358880 - DNA, 25 bp, Artificial
  Probe
cggcagggaactctacaagtgtttc

SEQ ID NO: 358881 - DNA, 25 bp, Artificial
  Probe
acaggagacatgttctcaccctgcc

SEQ ID NO: 358882 - DNA, 25 bp, Artificial
  Probe
caagaaagacctggagccctaatcc

SEQ ID NO: 358883 - DNA, 25 bp, Artificial
  Probe
ggacgagtggccaaggcatttctag

SEQ ID NO: 358884 - DNA, 25 bp, Artificial
  Probe
tagccccatggctaccagaaagaac

SEQ ID NO: 358885 - DNA, 25 bp, Artificial
  Probe
ctctgttctccctttcaggagctgt

SEQ ID NO: 358886 - DNA, 25 bp, Artificial
  Probe
ctcacaggtttgagccaagaaagac

SEQ ID NO: 358887 - DNA, 25 bp, Artificial
  Probe
gtatcagatgacgacataagattct

SEQ ID NO: 358888 - DNA, 25 bp, Artificial
  Probe
gcacctgtcatgatcacagggaaga

SEQ ID NO: 358889 - DNA, 25 bp, Artificial
  Probe
ctctgggacgagtggccaaggcatt

SEQ ID NO: 358890 - DNA, 25 bp, Artificial
  Probe
accttgtcccaggatgcacctgtca

SEQ ID NO: 358891 - DNA, 25 bp, Artificial
  Probe
cttcatgtagctagccccatggcta

SEQ ID NO: 358892 - DNA, 25 bp, Artificial
  Probe
ctctctaaacctcagtccagtgttg

SEQ ID NO: 358893 - DNA, 25 bp, Artificial
  Probe
tataagaaaaccaaggcatgctcac

SEQ ID NO: 358894 - DNA, 25 bp, Artificial
  Probe
agtggccaaggcatttctaggctta

SEQ ID NO: 358895 - DNA, 25 bp, Artificial
  Probe
tagctagccccatggctaccagaaa

SEQ ID NO: 358896 - DNA, 25 bp, Artificial
  Probe
cacctgaatctctgggacgagtggc

SEQ ID NO: 358897 - DNA, 25 bp, Artificial
  Probe
tcagtccagtgttgtgccgctggct

SEQ ID NO: 358898 - DNA, 25 bp, Artificial
  Probe
gttttccttcatgtagctagcccca

SEQ ID NO: 358899 - DNA, 25 bp, Artificial
  Probe
tgctcccattccattacggcacagg

SEQ ID NO: 358900 - DNA, 25 bp, Artificial
  Probe
agtccagtgttgtgccgctggctgt

SEQ ID NO: 358901 - DNA, 25 bp, Artificial
  Probe
ttgagccaagaaagacctggagccc

SEQ ID NO: 358902 - DNA, 25 bp, Artificial
  Probe
cggcggcagggaactctacaagtgt

SEQ ID NO: 358903 - DNA, 25 bp, Artificial
  Probe
taggagctggctgattttgtcaaac

SEQ ID NO: 358904 - DNA, 25 bp, Artificial
  Probe
ataagaaaaccaaggcatgctcaca

SEQ ID NO: 358905 - DNA, 25 bp, Artificial
  Probe
tgaatctctgggacgagtggccaag

SEQ ID NO: 358906 - DNA, 25 bp, Artificial
  Probe
actgcaagtatcagatgacgacata

SEQ ID NO: 358907 - DNA, 25 bp, Artificial
  Probe
tttgagccaagaaagacctggagcc

SEQ ID NO: 358908 - DNA, 25 bp, Artificial
  Probe
gtcttgattttgtcacctgaatctc

SEQ ID NO: 358909 - DNA, 25 bp, Artificial
  Probe
agctggctgattttgtcaaacccca

SEQ ID NO: 358910 - DNA, 25 bp, Artificial
  Probe
ccagtggtgacctctgttctccctt

SEQ ID NO: 358911 - DNA, 25 bp, Artificial
  Probe
gcatttctaggcttactgcaagtat

SEQ ID NO: 358912 - DNA, 25 bp, Artificial
  Probe
cctcagtccagtgttgtgccgctgg

SEQ ID NO: 358913 - DNA, 25 bp, Artificial
  Probe
tgacctctgttctccctttcaggag

SEQ ID NO: 358914 - DNA, 25 bp, Artificial
  Probe
actcaagcaggattagttcttaaag

SEQ ID NO: 358915 - DNA, 25 bp, Artificial
  Probe
tacggcacaggagacatgttctcac

SEQ ID NO: 358916 - DNA, 25 bp, Artificial
  Probe
tcccattccattacggcacaggaga

SEQ ID NO: 358917 - DNA, 25 bp, Artificial
  Probe
aaaccaaggcatgctcacaggtttg

SEQ ID NO: 358918 - DNA, 25 bp, Artificial
  Probe
tggctaccagaaagaactagaatag

SEQ ID NO: 358919 - DNA, 25 bp, Artificial
  Probe
gagacatgttctcaccctgcctagc

SEQ ID NO: 358920 - DNA, 25 bp, Artificial
  Probe
gtgttgtgccgctggctgtaccaca

SEQ ID NO: 358921 - DNA, 25 bp, Artificial
  Probe
tttcctccgggtcttgattttgtca

SEQ ID NO: 358922 - DNA, 25 bp, Artificial
  Probe
gacgagtggccaaggcatttctagg

SEQ ID NO: 358923 - DNA, 25 bp, Artificial
  Probe
ttccattacggcacaggagacatgt

SEQ ID NO: 358924 - DNA, 25 bp, Artificial
  Probe
caaggcatttctaggcttactgcaa

SEQ ID NO: 358925 - DNA, 25 bp, Artificial
  Probe
gtagctagccccatggctaccagaa

SEQ ID NO: 358926 - DNA, 25 bp, Artificial
  Probe
cagagcctgccgtaatcgccgagtg

SEQ ID NO: 358927 - DNA, 25 bp, Artificial
  Probe
acagagactccgtagacgaagatgg

SEQ ID NO: 358928 - DNA, 25 bp, Artificial
  Probe
agcacattctggagtcgagtcggaa

SEQ ID NO: 358929 - DNA, 25 bp, Artificial
  Probe
tcggcccgtgactcgaagtcctggg

SEQ ID NO: 358930 - DNA, 25 bp, Artificial
  Probe
ccgagcacattctggagtcgagtcg

SEQ ID NO: 358931 - DNA, 25 bp, Artificial
  Probe
tcctgggacatccagggagcatcga

SEQ ID NO: 358932 - DNA, 25 bp, Artificial
  Probe
cgaagtcctgggacatccagggagc

SEQ ID NO: 358933 - DNA, 25 bp, Artificial
  Probe
cccgtgactcgaagtcctgggacat

SEQ ID NO: 358934 - DNA, 25 bp, Artificial
  Probe
acccgagcacattctggagtcgagt

SEQ ID NO: 358935 - DNA, 25 bp, Artificial
  Probe
cattctggagtcgagtcggaaagct

SEQ ID NO: 358936 - DNA, 25 bp, Artificial
  Probe
cccgagcacattctggagtcgagtc

SEQ ID NO: 358937 - DNA, 25 bp, Artificial
  Probe
acatgacccgagcacattctggagt

SEQ ID NO: 358938 - DNA, 25 bp, Artificial
  Probe
ctgcacagagactccgtagacgaag

SEQ ID NO: 358939 - DNA, 25 bp, Artificial
  Probe
gctgcacagagactccgtagacgaa

SEQ ID NO: 358940 - DNA, 25 bp, Artificial
  Probe
gcctagggtctctggctgcagcaga

SEQ ID NO: 358941 - DNA, 25 bp, Artificial
  Probe
gcctgcaagtgtgagacagtagtga

SEQ ID NO: 358942 - DNA, 25 bp, Artificial
  Probe
tggctgcagcagagcctgccgtaat

SEQ ID NO: 358943 - DNA, 25 bp, Artificial
  Probe
cacattctggagtcgagtcggaaag

SEQ ID NO: 358944 - DNA, 25 bp, Artificial
  Probe
atgacccgagcacattctggagtcg

SEQ ID NO: 358945 - DNA, 25 bp, Artificial
  Probe
gtcctgggacatccagggagcatcg

SEQ ID NO: 358946 - DNA, 25 bp, Artificial
  Probe
gacccgagcacattctggagtcgag

SEQ ID NO: 358947 - DNA, 25 bp, Artificial
  Probe
agaggtgttccagatctcgcggaac

SEQ ID NO: 358948 - DNA, 25 bp, Artificial
  Probe
gcacattctggagtcgagtcggaaa

SEQ ID NO: 358949 - DNA, 25 bp, Artificial
  Probe
agcctagggtctctggctgcagcag

SEQ ID NO: 358950 - DNA, 25 bp, Artificial
  Probe
cgagcacattctggagtcgagtcgg

SEQ ID NO: 358951 - DNA, 25 bp, Artificial
  Probe
ctggctgcagcagagcctgccgtaa

SEQ ID NO: 358952 - DNA, 25 bp, Artificial
  Probe
gtgactcgaagtcctgggacatcca

SEQ ID NO: 358953 - DNA, 25 bp, Artificial
  Probe
ctctggctgcagcagagcctgccgt

SEQ ID NO: 358954 - DNA, 25 bp, Artificial
  Probe
ctgctgcacagagactccgtagacg

SEQ ID NO: 358955 - DNA, 25 bp, Artificial
  Probe
tctggctgcagcagagcctgccgta

SEQ ID NO: 358956 - DNA, 25 bp, Artificial
  Probe
cagaggtgttccagatctcgcggaa

SEQ ID NO: 358957 - DNA, 25 bp, Artificial
  Probe
tgctgcacagagactccgtagacga

SEQ ID NO: 358958 - DNA, 25 bp, Artificial
  Probe
cagatctcgcggaacctcatcgatc

SEQ ID NO: 358959 - DNA, 25 bp, Artificial
  Probe
cggcccgtgactcgaagtcctggga

SEQ ID NO: 358960 - DNA, 25 bp, Artificial
  Probe
ccgtgactcgaagtcctgggacatc

SEQ ID NO: 358961 - DNA, 25 bp, Artificial
  Probe
tgagacagtagtgacccctcggccc

SEQ ID NO: 358962 - DNA, 25 bp, Artificial
  Probe
ctcggcccgtgactcgaagtcctgg

SEQ ID NO: 358963 - DNA, 25 bp, Artificial
  Probe
agagcctgccgtaatcgccgagtgc

SEQ ID NO: 358964 - DNA, 25 bp, Artificial
  Probe
gagcacattctggagtcgagtcgga

SEQ ID NO: 358965 - DNA, 25 bp, Artificial
  Probe
cctgggacatccagggagcatcgag

SEQ ID NO: 358966 - DNA, 25 bp, Artificial
  Probe
gaagtcctgggacatccagggagca

SEQ ID NO: 358967 - DNA, 25 bp, Artificial
  Probe
catgacccgagcacattctggagtc

SEQ ID NO: 358968 - DNA, 25 bp, Artificial
  Probe
gagacagtagtgacccctcggcccg

SEQ ID NO: 358969 - DNA, 25 bp, Artificial
  Probe
cagagactccgtagacgaagatggg

SEQ ID NO: 358970 - DNA, 25 bp, Artificial
  Probe
gactcgaagtcctgggacatccagg

SEQ ID NO: 358971 - DNA, 25 bp, Artificial
  Probe
gagcctagggtctctggctgcagca

SEQ ID NO: 358972 - DNA, 25 bp, Artificial
  Probe
ttcagggactccaggcattaacaat

SEQ ID NO: 358973 - DNA, 25 bp, Artificial
  Probe
gttctttgtcccaggcagccaggtt

SEQ ID NO: 358974 - DNA, 25 bp, Artificial
  Probe
ggaacaatccagatttctaacccag

SEQ ID NO: 358975 - DNA, 25 bp, Artificial
  Probe
ggtgctacaattgtacagtatgcag

SEQ ID NO: 358976 - DNA, 25 bp, Artificial
  Probe
tcagccgatggcacacagcagttct

SEQ ID NO: 358977 - DNA, 25 bp, Artificial
  Probe
gaagaagggacaccacctaacattg

SEQ ID NO: 358978 - DNA, 25 bp, Artificial
  Probe
ctccgccaggtgctacaattgtaca

SEQ ID NO: 358979 - DNA, 25 bp, Artificial
  Probe
ctgatggtgttcagggactccaggc

SEQ ID NO: 358980 - DNA, 25 bp, Artificial
  Probe
tagcccaaggtggaacaatccagat

SEQ ID NO: 358981 - DNA, 25 bp, Artificial
  Probe
atgacaaattcaggagctcctccgc

SEQ ID NO: 358982 - DNA, 25 bp, Artificial
  Probe
tggtgttcagggactccaggcatta

SEQ ID NO: 358983 - DNA, 25 bp, Artificial
  Probe
atccagatttctaacccaggatctg

SEQ ID NO: 358984 - DNA, 25 bp, Artificial
  Probe
tccagatttctaacccaggatctga

SEQ ID NO: 358985 - DNA, 25 bp, Artificial
  Probe
tgctacaattgtacagtatgcagca

SEQ ID NO: 358986 - DNA, 25 bp, Artificial
  Probe
atacattgctatagcccaaggtgga

SEQ ID NO: 358987 - DNA, 25 bp, Artificial
  Probe
ggtgttcagggactccaggcattaa

SEQ ID NO: 358988 - DNA, 25 bp, Artificial
  Probe
tagcacggggcaatacattgctata

SEQ ID NO: 358989 - DNA, 25 bp, Artificial
  Probe
atggcacacagcagttctttgtccc

SEQ ID NO: 358990 - DNA, 25 bp, Artificial
  Probe
ggcacacagcagttctttgtcccag

SEQ ID NO: 358991 - DNA, 25 bp, Artificial
  Probe
cgccaggtgctacaattgtacagta

SEQ ID NO: 358992 - DNA, 25 bp, Artificial
  Probe
gaacaatccagatttctaacccagg

SEQ ID NO: 358993 - DNA, 25 bp, Artificial
  Probe
gcagtaccaactagcatatatcaga

SEQ ID NO: 358994 - DNA, 25 bp, Artificial
  Probe
cacaatcagccgatggcacacagca

SEQ ID NO: 358995 - DNA, 25 bp, Artificial
  Probe
agcagttctttgtcccaggcagcca

SEQ ID NO: 358996 - DNA, 25 bp, Artificial
  Probe
gactccaggcattaacaatgacaaa

SEQ ID NO: 358997 - DNA, 25 bp, Artificial
  Probe
ttgctatagcccaaggtggaacaat

SEQ ID NO: 358998 - DNA, 25 bp, Artificial
  Probe
ggcaatacattgctatagcccaagg

SEQ ID NO: 358999 - DNA, 25 bp, Artificial
  Probe
acaatcagccgatggcacacagcag

SEQ ID NO: 359000 - DNA, 25 bp, Artificial
  Probe
ccaggtgctacaattgtacagtatg

SEQ ID NO: 359001 - DNA, 25 bp, Artificial
  Probe
cattaacaatgacaaattcaggagc

SEQ ID NO: 359002 - DNA, 25 bp, Artificial
  Probe
aactagcatatatcagactagcacg

SEQ ID NO: 359003 - DNA, 25 bp, Artificial
  Probe
tatcagactagcacggggcaataca

SEQ ID NO: 359004 - DNA, 25 bp, Artificial
  Probe
cagccaggttgttgttcaagatgag

SEQ ID NO: 359005 - DNA, 25 bp, Artificial
  Probe
tgctaccatggcagtaccaactagc

SEQ ID NO: 359006 - DNA, 25 bp, Artificial
  Probe
ccacctaacattgctaccatggcag

SEQ ID NO: 359007 - DNA, 25 bp, Artificial
  Probe
ttaacaatgacaaattcaggagctc

SEQ ID NO: 359008 - DNA, 25 bp, Artificial
  Probe
tttgtcccaggcagccaggttgttg

SEQ ID NO: 359009 - DNA, 25 bp, Artificial
  Probe
gggactccaggcattaacaatgaca

SEQ ID NO: 359010 - DNA, 25 bp, Artificial
  Probe
ctagcacggggcaatacattgctat

SEQ ID NO: 359011 - DNA, 25 bp, Artificial
  Probe
tgcagcacaatcagccgatggcaca

SEQ ID NO: 359012 - DNA, 25 bp, Artificial
  Probe
gtggaacaatccagatttctaaccc

SEQ ID NO: 359013 - DNA, 25 bp, Artificial
  Probe
agaagggacaccacctaacattgct

SEQ ID NO: 359014 - DNA, 25 bp, Artificial
  Probe
gatttctaacccaggatctgatggt

SEQ ID NO: 359015 - DNA, 25 bp, Artificial
  Probe
gggacaccacctaacattgctacca

SEQ ID NO: 359016 - DNA, 25 bp, Artificial
  Probe
acattgctaccatggcagtaccaac

SEQ ID NO: 359017 - DNA, 25 bp, Artificial
  Probe
ctacaattgtacagtatgcagcaca

SEQ ID NO: 359018 - DNA, 25 bp, Artificial
  Probe
aggcctggtcatgcatcctgctgtg

SEQ ID NO: 359019 - DNA, 25 bp, Artificial
  Probe
ctgctctgctgcaggaccttgacac

SEQ ID NO: 359020 - DNA, 25 bp, Artificial
  Probe
ttcctcaacagattcagaaggggcg

SEQ ID NO: 359021 - DNA, 25 bp, Artificial
  Probe
gtggatgaggcctggtcatgcatcc

SEQ ID NO: 359022 - DNA, 25 bp, Artificial
  Probe
tggtcacaaagtaccagcagcttcg

SEQ ID NO: 359023 - DNA, 25 bp, Artificial
  Probe
ggcacgtgctgctctgctgcaggac

SEQ ID NO: 359024 - DNA, 25 bp, Artificial
  Probe
gcccgccatgtttgaatactgtcca

SEQ ID NO: 359025 - DNA, 25 bp, Artificial
  Probe
gtctgtcaacaacaataaagtacag

SEQ ID NO: 359026 - DNA, 25 bp, Artificial
  Probe
tcaacaacaataaagtacagcaggt

SEQ ID NO: 359027 - DNA, 25 bp, Artificial
  Probe
aggttctgtccaaccatgtctgtca

SEQ ID NO: 359028 - DNA, 25 bp, Artificial
  Probe
ccctgctgacccaacagggaacgtg

SEQ ID NO: 359029 - DNA, 25 bp, Artificial
  Probe
caggggcacgtgctgctctgctgca

SEQ ID NO: 359030 - DNA, 25 bp, Artificial
  Probe
tcaggggcacgtgctgctctgctgc

SEQ ID NO: 359031 - DNA, 25 bp, Artificial
  Probe
ccgccatgtttgaatactgtccaat

SEQ ID NO: 359032 - DNA, 25 bp, Artificial
  Probe
atgaggcctggtcatgcatcctgct

SEQ ID NO: 359033 - DNA, 25 bp, Artificial
  Probe
atgtttgaatactgtccaatcacag

SEQ ID NO: 359034 - DNA, 25 bp, Artificial
  Probe
agcagcttcgaatctactggacaaa

SEQ ID NO: 359035 - DNA, 25 bp, Artificial
  Probe
gtcacaaagtaccagcagcttcgaa

SEQ ID NO: 359036 - DNA, 25 bp, Artificial
  Probe
cgaatctactggacaaagtattatg

SEQ ID NO: 359037 - DNA, 25 bp, Artificial
  Probe
cacgtgctgctctgctgcaggacct

SEQ ID NO: 359038 - DNA, 25 bp, Artificial
  Probe
tgaggcctggtcatgcatcctgctg

SEQ ID NO: 359039 - DNA, 25 bp, Artificial
  Probe
ccactcgggatcacagtccatgctt

SEQ ID NO: 359040 - DNA, 25 bp, Artificial
  Probe
tcgggatcacagtccatgcttctga

SEQ ID NO: 359041 - DNA, 25 bp, Artificial
  Probe
tcatgcatcctgctgtgaacccagc

SEQ ID NO: 359042 - DNA, 25 bp, Artificial
  Probe
tgctgctctgctgcaggaccttgac

SEQ ID NO: 359043 - DNA, 25 bp, Artificial
  Probe
gcatcctgctgtgaacccagcagca

SEQ ID NO: 359044 - DNA, 25 bp, Artificial
  Probe
tgctgacccaacagggaacgtggct

SEQ ID NO: 359045 - DNA, 25 bp, Artificial
  Probe
atcacagtccatgcttctgatgccc

SEQ ID NO: 359046 - DNA, 25 bp, Artificial
  Probe
ctggtcatgcatcctgctgtgaacc

SEQ ID NO: 359047 - DNA, 25 bp, Artificial
  Probe
ggcctggtcatgcatcctgctgtga

SEQ ID NO: 359048 - DNA, 25 bp, Artificial
  Probe
cttcctcaacagattcagaaggggc

SEQ ID NO: 359049 - DNA, 25 bp, Artificial
  Probe
gcagcttcgaatctactggacaaag

SEQ ID NO: 359050 - DNA, 25 bp, Artificial
  Probe
gatcacagtccatgcttctgatgcc

SEQ ID NO: 359051 - DNA, 25 bp, Artificial
  Probe
ctcgggatcacagtccatgcttctg

SEQ ID NO: 359052 - DNA, 25 bp, Artificial
  Probe
cctggtcatgcatcctgctgtgaac

SEQ ID NO: 359053 - DNA, 25 bp, Artificial
  Probe
atgcatcctgctgtgaacccagcag

SEQ ID NO: 359054 - DNA, 25 bp, Artificial
  Probe
gccttcctcaacagattcagaaggg

SEQ ID NO: 359055 - DNA, 25 bp, Artificial
  Probe
ctgctgacccaacagggaacgtggc

SEQ ID NO: 359056 - DNA, 25 bp, Artificial
  Probe
gtcaacaacaataaagtacagcagg

SEQ ID NO: 359057 - DNA, 25 bp, Artificial
  Probe
cagcagcttcgaatctactggacaa

SEQ ID NO: 359058 - DNA, 25 bp, Artificial
  Probe
acaacaataaagtacagcaggtgcc

SEQ ID NO: 359059 - DNA, 25 bp, Artificial
  Probe
tcacagtccatgcttctgatgcccg

SEQ ID NO: 359060 - DNA, 25 bp, Artificial
  Probe
gggaggttctgtccaaccatgtctg

SEQ ID NO: 359061 - DNA, 25 bp, Artificial
  Probe
gttctgtccaaccatgtctgtcaac

SEQ ID NO: 359062 - DNA, 25 bp, Artificial
  Probe
gggatcacagtccatgcttctgatg

SEQ ID NO: 359063 - DNA, 25 bp, Artificial
  Probe
cttcgaatctactggacaaagtatt

SEQ ID NO: 359064 - DNA, 25 bp, Artificial
  Probe
cacaagggttatctgtcggaagggt

SEQ ID NO: 359065 - DNA, 25 bp, Artificial
  Probe
ggctggccagaatcgcggaccagca

SEQ ID NO: 359066 - DNA, 25 bp, Artificial
  Probe
gcattactcccacaagggttatctg

SEQ ID NO: 359067 - DNA, 25 bp, Artificial
  Probe
cacgaaagccatcgatatgtgggca

SEQ ID NO: 359068 - DNA, 25 bp, Artificial
  Probe
agacaccatccctgtagtgcgggag

SEQ ID NO: 359069 - DNA, 25 bp, Artificial
  Probe
agctgctcagggtgatgccgtcctt

SEQ ID NO: 359070 - DNA, 25 bp, Artificial
  Probe
tatgtgggcagctggctgcatccta

SEQ ID NO: 359071 - DNA, 25 bp, Artificial
  Probe
ccagaatcgcggaccagcattactc

SEQ ID NO: 359072 - DNA, 25 bp, Artificial
  Probe
ggtgaagaggccactgcgtaagcta

SEQ ID NO: 359073 - DNA, 25 bp, Artificial
  Probe
tcatcagcacggaggacctcgtgct

SEQ ID NO: 359074 - DNA, 25 bp, Artificial
  Probe
agggtgatgccgtcctttgtcagca

SEQ ID NO: 359075 - DNA, 25 bp, Artificial
  Probe
ttcgggctggccagaatcgcggacc

SEQ ID NO: 359076 - DNA, 25 bp, Artificial
  Probe
atgctcacggggaaaatgctctttg

SEQ ID NO: 359077 - DNA, 25 bp, Artificial
  Probe
gcctgctagagcagggcacgctgac

SEQ ID NO: 359078 - DNA, 25 bp, Artificial
  Probe
gcttgagcagatgcagctcatccta

SEQ ID NO: 359079 - DNA, 25 bp, Artificial
  Probe
catcctagacaccatccctgtagtg

SEQ ID NO: 359080 - DNA, 25 bp, Artificial
  Probe
ctgtccccgaacaactacacgaaag

SEQ ID NO: 359081 - DNA, 25 bp, Artificial
  Probe
ccgccaacattttcatcagcacgga

SEQ ID NO: 359082 - DNA, 25 bp, Artificial
  Probe
cgaggagcacgctaagctattcatg

SEQ ID NO: 359083 - DNA, 25 bp, Artificial
  Probe
gcagctggctgcatcctagcggaga

SEQ ID NO: 359084 - DNA, 25 bp, Artificial
  Probe
agctactcccggatgtcaaccgtga

SEQ ID NO: 359085 - DNA, 25 bp, Artificial
  Probe
gatgcagctcatcctagacaccatc

SEQ ID NO: 359086 - DNA, 25 bp, Artificial
  Probe
gggaaaatgctctttgctggggctc

SEQ ID NO: 359087 - DNA, 25 bp, Artificial
  Probe
agtggtaccgctctccacgactgct

SEQ ID NO: 359088 - DNA, 25 bp, Artificial
  Probe
cctggcatgcctgctagagcagggc

SEQ ID NO: 359089 - DNA, 25 bp, Artificial
  Probe
gcatcctagcggagatgctcacggg

SEQ ID NO: 359090 - DNA, 25 bp, Artificial
  Probe
cctttgtcagcagcacttgggaggt

SEQ ID NO: 359091 - DNA, 25 bp, Artificial
  Probe
acggaggacctcgtgctgaagatcg

SEQ ID NO: 359092 - DNA, 25 bp, Artificial
  Probe
tgcgtaagctactcccggatgtcaa

SEQ ID NO: 359093 - DNA, 25 bp, Artificial
  Probe
tgacaaagtggtaccgctctccacg

SEQ ID NO: 359094 - DNA, 25 bp, Artificial
  Probe
agctggctgcatcctagcggagatg

SEQ ID NO: 359095 - DNA, 25 bp, Artificial
  Probe
ctcgtgctgaagatcggggatttcg

SEQ ID NO: 359096 - DNA, 25 bp, Artificial
  Probe
ggctcacgagcttgagcagatgcag

SEQ ID NO: 359097 - DNA, 25 bp, Artificial
  Probe
gaatcgcggaccagcattactccca

SEQ ID NO: 359098 - DNA, 25 bp, Artificial
  Probe
gaaagccatcgatatgtgggcagct

SEQ ID NO: 359099 - DNA, 25 bp, Artificial
  Probe
tagcggagatgctcacggggaaaat

SEQ ID NO: 359100 - DNA, 25 bp, Artificial
  Probe
gcacgctgaccgaggagcacgctaa

SEQ ID NO: 359101 - DNA, 25 bp, Artificial
  Probe
gcttatattgtccaagagtacatgg

SEQ ID NO: 359102 - DNA, 25 bp, Artificial
  Probe
tttgctggggctcacgagcttgagc

SEQ ID NO: 359103 - DNA, 25 bp, Artificial
  Probe
caactacacgaaagccatcgatatg

SEQ ID NO: 359104 - DNA, 25 bp, Artificial
  Probe
ctcccacaagggttatctgtcggaa

SEQ ID NO: 359105 - DNA, 25 bp, Artificial
  Probe
aatgctctttgctggggctcacgag

SEQ ID NO: 359106 - DNA, 25 bp, Artificial
  Probe
gacctcgtgctgaagatcggggatt

SEQ ID NO: 359107 - DNA, 25 bp, Artificial
  Probe
tgcctgctagagcagggcacgctga

SEQ ID NO: 359108 - DNA, 25 bp, Artificial
  Probe
tgctcacggggaaaatgctctttgc

SEQ ID NO: 359109 - DNA, 25 bp, Artificial
  Probe
gtacatggagactgacctggcatgc

SEQ ID NO: 359110 - DNA, 25 bp, Artificial
  Probe
tggaagtgtcgctgatttttgatcc

SEQ ID NO: 359111 - DNA, 25 bp, Artificial
  Probe
ggaatattgaactccgggtcaaagg

SEQ ID NO: 359112 - DNA, 25 bp, Artificial
  Probe
ttcgtggcagagatttcaaatcgga

SEQ ID NO: 359113 - DNA, 25 bp, Artificial
  Probe
ggtgccccctggtacctcattcaga

SEQ ID NO: 359114 - DNA, 25 bp, Artificial
  Probe
catcttgcttgtgttagtaactggg

SEQ ID NO: 359115 - DNA, 25 bp, Artificial
  Probe
tccatgggagatgcaggctattaca

SEQ ID NO: 359116 - DNA, 25 bp, Artificial
  Probe
tgccacgaatccacggagttttcag

SEQ ID NO: 359117 - DNA, 25 bp, Artificial
  Probe
cactctggaagttggtgtggacgat

SEQ ID NO: 359118 - DNA, 25 bp, Artificial
  Probe
atccctgtgatcatttctcccctgg

SEQ ID NO: 359119 - DNA, 25 bp, Artificial
  Probe
caaggaatacaacatcactaggaat

SEQ ID NO: 359120 - DNA, 25 bp, Artificial
  Probe
accactccagcagtggtgcacacag

SEQ ID NO: 359121 - DNA, 25 bp, Artificial
  Probe
gaactcaaggtctttaagaataccg

SEQ ID NO: 359122 - DNA, 25 bp, Artificial
  Probe
atcgtgtggtggatggctaacagca

SEQ ID NO: 359123 - DNA, 25 bp, Artificial
  Probe
catcctcttggataaaggcaataag

SEQ ID NO: 359124 - DNA, 25 bp, Artificial
  Probe
ctccaccgggttacttgtgtgccct

SEQ ID NO: 359125 - DNA, 25 bp, Artificial
  Probe
tatgggctgaccaagctaccgactg

SEQ ID NO: 359126 - DNA, 25 bp, Artificial
  Probe
tgtgttatgacatttacctacgagg

SEQ ID NO: 359127 - DNA, 25 bp, Artificial
  Probe
tgcaaggtgttcctgggaactggta

SEQ ID NO: 359128 - DNA, 25 bp, Artificial
  Probe
tattgatatccaacacatccatggg

SEQ ID NO: 359129 - DNA, 25 bp, Artificial
  Probe
gtaactggggtttcagctttcacca

SEQ ID NO: 359130 - DNA, 25 bp, Artificial
  Probe
caccagtactcagagaatgatgaga

SEQ ID NO: 359131 - DNA, 25 bp, Artificial
  Probe
ttcagctttcaccactccagcagtg

SEQ ID NO: 359132 - DNA, 25 bp, Artificial
  Probe
ggcctacccaagaggccgtgtgact

SEQ ID NO: 359133 - DNA, 25 bp, Artificial
  Probe
ttgatccagtcacaaaggaggatct

SEQ ID NO: 359134 - DNA, 25 bp, Artificial
  Probe
gagtaaatcggactcttctcagctg

SEQ ID NO: 359135 - DNA, 25 bp, Artificial
  Probe
aggatgatacgctctgggttctgcc

SEQ ID NO: 359136 - DNA, 25 bp, Artificial
  Probe
ttctgacatggagtaaatcggactc

SEQ ID NO: 359137 - DNA, 25 bp, Artificial
  Probe
aggctccgagggtcctgtgcactct

SEQ ID NO: 359138 - DNA, 25 bp, Artificial
  Probe
ctccagcagaactgatggaaagata

SEQ ID NO: 359139 - DNA, 25 bp, Artificial
  Probe
tggtacctcattcagacacctccag

SEQ ID NO: 359140 - DNA, 25 bp, Artificial
  Probe
ttttaaatgtgttgccacgaatcca

SEQ ID NO: 359141 - DNA, 25 bp, Artificial
  Probe
agagctccaggctccgagggtcctg

SEQ ID NO: 359142 - DNA, 25 bp, Artificial
  Probe
tgagcccgtggtcctgaggtgcccc

SEQ ID NO: 359143 - DNA, 25 bp, Artificial
  Probe
cagtactcagagaatgatgagaact

SEQ ID NO: 359144 - DNA, 25 bp, Artificial
  Probe
ccctgacctgaaagagttcatctcc

SEQ ID NO: 359145 - DNA, 25 bp, Artificial
  Probe
acatcactaggaatattgaactccg

SEQ ID NO: 359146 - DNA, 25 bp, Artificial
  Probe
gaaatttctgagtgcgggagacccc

SEQ ID NO: 359147 - DNA, 25 bp, Artificial
  Probe
gttcccgcagccttctgacatggag

SEQ ID NO: 359148 - DNA, 25 bp, Artificial
  Probe
tgtggacgatgttcatcttgcttgt

SEQ ID NO: 359149 - DNA, 25 bp, Artificial
  Probe
gatggctaacagcacgtttatctca

SEQ ID NO: 359150 - DNA, 25 bp, Artificial
  Probe
gtggtcctgaggtgccccctggtac

SEQ ID NO: 359151 - DNA, 25 bp, Artificial
  Probe
acctacgagggcaaggaatacaaca

SEQ ID NO: 359152 - DNA, 25 bp, Artificial
  Probe
tggtataagggctccatcctcttgg

SEQ ID NO: 359153 - DNA, 25 bp, Artificial
  Probe
ctttggggtcaagactgatagtccc

SEQ ID NO: 359154 - DNA, 25 bp, Artificial
  Probe
tcccaggagatgagccaaggatgtg

SEQ ID NO: 359155 - DNA, 25 bp, Artificial
  Probe
gagttcatctccagcagaactgatg

SEQ ID NO: 359156 - DNA, 25 bp, Artificial
  Probe
gttacttcactatggacttcaagca

SEQ ID NO: 359157 - DNA, 25 bp, Artificial
  Probe
cgtccctggccagcagtggagtaaa

SEQ ID NO: 359158 - DNA, 25 bp, Artificial
  Probe
gaaccgttacttcactatggacttc

SEQ ID NO: 359159 - DNA, 25 bp, Artificial
  Probe
tgagcaagagcagctcccagctccg

SEQ ID NO: 359160 - DNA, 25 bp, Artificial
  Probe
gtccatcctgagcaagagcagctcc

SEQ ID NO: 359161 - DNA, 25 bp, Artificial
  Probe
catcctgagcaagagcagctcccag

SEQ ID NO: 359162 - DNA, 25 bp, Artificial
  Probe
ctgtccatcctgagcaagagcagct

SEQ ID NO: 359163 - DNA, 25 bp, Artificial
  Probe
tccctggccagcagtggagtaaatg

SEQ ID NO: 359164 - DNA, 25 bp, Artificial
  Probe
tgcctgagcatgtttgtgcctctcc

SEQ ID NO: 359165 - DNA, 25 bp, Artificial
  Probe
ggccagtgcctgagcatgtttgtgc

SEQ ID NO: 359166 - DNA, 25 bp, Artificial
  Probe
ggggaacccagctgtccatcctgag

SEQ ID NO: 359167 - DNA, 25 bp, Artificial
  Probe
tcctcccaaaggaagagagagatag

SEQ ID NO: 359168 - DNA, 25 bp, Artificial
  Probe
acttcactatggacttcaagcaccg

SEQ ID NO: 359169 - DNA, 25 bp, Artificial
  Probe
aacttggccacctgaggcctgtctc

SEQ ID NO: 359170 - DNA, 25 bp, Artificial
  Probe
ttcactatggacttcaagcaccggc

SEQ ID NO: 359171 - DNA, 25 bp, Artificial
  Probe
ccctgggtaggaagctgggctcctc

SEQ ID NO: 359172 - DNA, 25 bp, Artificial
  Probe
atgggggaacccagctgtccatcct

SEQ ID NO: 359173 - DNA, 25 bp, Artificial
  Probe
ggaacccagctgtccatcctgagca

SEQ ID NO: 359174 - DNA, 25 bp, Artificial
  Probe
cctcccaaaggaagagagagatagg

SEQ ID NO: 359175 - DNA, 25 bp, Artificial
  Probe
tgtccatcctgagcaagagcagctc

SEQ ID NO: 359176 - DNA, 25 bp, Artificial
  Probe
tcactatggacttcaagcaccggca

SEQ ID NO: 359177 - DNA, 25 bp, Artificial
  Probe
gtgcctgagcatgtttgtgcctctc

SEQ ID NO: 359178 - DNA, 25 bp, Artificial
  Probe
acaacttggccacctgaggcctgtc

SEQ ID NO: 359179 - DNA, 25 bp, Artificial
  Probe
ggtgaaccgttacttcactatggac

SEQ ID NO: 359180 - DNA, 25 bp, Artificial
  Probe
ccgttacttcactatggacttcaag

SEQ ID NO: 359181 - DNA, 25 bp, Artificial
  Probe
atggacttcaagcaccggcacccgt

SEQ ID NO: 359182 - DNA, 25 bp, Artificial
  Probe
tatggacttcaagcaccggcacccg

SEQ ID NO: 359183 - DNA, 25 bp, Artificial
  Probe
cgggccagtgcctgagcatgtttgt

SEQ ID NO: 359184 - DNA, 25 bp, Artificial
  Probe
ccgtccctggccagcagtggagtaa

SEQ ID NO: 359185 - DNA, 25 bp, Artificial
  Probe
agctgtccatcctgagcaagagcag

SEQ ID NO: 359186 - DNA, 25 bp, Artificial
  Probe
tcctgagcaagagcagctcccagct

SEQ ID NO: 359187 - DNA, 25 bp, Artificial
  Probe
cccagctgtccatcctgagcaagag

SEQ ID NO: 359188 - DNA, 25 bp, Artificial
  Probe
caacttggccacctgaggcctgtct

SEQ ID NO: 359189 - DNA, 25 bp, Artificial
  Probe
gtccctggccagcagtggagtaaat

SEQ ID NO: 359190 - DNA, 25 bp, Artificial
  Probe
cgttacttcactatggacttcaagc

SEQ ID NO: 359191 - DNA, 25 bp, Artificial
  Probe
actatggacttcaagcaccggcacc

SEQ ID NO: 359192 - DNA, 25 bp, Artificial
  Probe
gacaacttggccacctgaggcctgt

SEQ ID NO: 359193 - DNA, 25 bp, Artificial
  Probe
cggccgacaacttggccacctgagg

SEQ ID NO: 359194 - DNA, 25 bp, Artificial
  Probe
cagctgtccatcctgagcaagagca

SEQ ID NO: 359195 - DNA, 25 bp, Artificial
  Probe
ccctggccagcagtggagtaaatgg

SEQ ID NO: 359196 - DNA, 25 bp, Artificial
  Probe
gggggaacccagctgtccatcctga

SEQ ID NO: 359197 - DNA, 25 bp, Artificial
  Probe
atcctgagcaagagcagctcccagc

SEQ ID NO: 359198 - DNA, 25 bp, Artificial
  Probe
tgaaccgttacttcactatggactt

SEQ ID NO: 359199 - DNA, 25 bp, Artificial
  Probe
ccagctgtccatcctgagcaagagc

SEQ ID NO: 359200 - DNA, 25 bp, Artificial
  Probe
gggaacccagctgtccatcctgagc

SEQ ID NO: 359201 - DNA, 25 bp, Artificial
  Probe
agtgcctgagcatgtttgtgcctct

SEQ ID NO: 359202 - DNA, 25 bp, Artificial
  Probe
agctcaacctactgtgtcaaggcca

SEQ ID NO: 359203 - DNA, 25 bp, Artificial
  Probe
caaggccttgtgagctgaggctgaa

SEQ ID NO: 359204 - DNA, 25 bp, Artificial
  Probe
tgagctgaggctgaaaggcctgttt

SEQ ID NO: 359205 - DNA, 25 bp, Artificial
  Probe
ggtcccacctactgtgattcattga

SEQ ID NO: 359206 - DNA, 25 bp, Artificial
  Probe
ttgggtcccacctactgtgattcat

SEQ ID NO: 359207 - DNA, 25 bp, Artificial
  Probe
aatttggaaagttgccccatctctg

SEQ ID NO: 359208 - DNA, 25 bp, Artificial
  Probe
ggctgatattgctcctcctgtttgg

SEQ ID NO: 359209 - DNA, 25 bp, Artificial
  Probe
ccttgtgagctgaggctgaaaggcc

SEQ ID NO: 359210 - DNA, 25 bp, Artificial
  Probe
aggctgatattgctcctcctgtttg

SEQ ID NO: 359211 - DNA, 25 bp, Artificial
  Probe
tgtgattcattgagcctgatttgac

SEQ ID NO: 359212 - DNA, 25 bp, Artificial
  Probe
gtgatagtctgatcccaggtacaag

SEQ ID NO: 359213 - DNA, 25 bp, Artificial
  Probe
tcccacctactgtgattcattgagc

SEQ ID NO: 359214 - DNA, 25 bp, Artificial
  Probe
attgctcctcctgtttgggtcccac

SEQ ID NO: 359215 - DNA, 25 bp, Artificial
  Probe
agctgaggctgaaaggcctgttttg

SEQ ID NO: 359216 - DNA, 25 bp, Artificial
  Probe
tgagcctgatttgacatgtaaatac

SEQ ID NO: 359217 - DNA, 25 bp, Artificial
  Probe
ctcctgtttgggtcccacctactgt

SEQ ID NO: 359218 - DNA, 25 bp, Artificial
  Probe
tagtctgatcccaggtacaaggcct

SEQ ID NO: 359219 - DNA, 25 bp, Artificial
  Probe
aaggccagcctcagtgatagtctga

SEQ ID NO: 359220 - DNA, 25 bp, Artificial
  Probe
tgtttgggtcccacctactgtgatt

SEQ ID NO: 359221 - DNA, 25 bp, Artificial
  Probe
attcattgagcctgatttgacatgt

SEQ ID NO: 359222 - DNA, 25 bp, Artificial
  Probe
cattgagcctgatttgacatgtaaa

SEQ ID NO: 359223 - DNA, 25 bp, Artificial
  Probe
tgtgtcaaggccagcctcagtgata

SEQ ID NO: 359224 - DNA, 25 bp, Artificial
  Probe
ccagcctcagtgatagtctgatccc

SEQ ID NO: 359225 - DNA, 25 bp, Artificial
  Probe
aggccagcctcagtgatagtctgat

SEQ ID NO: 359226 - DNA, 25 bp, Artificial
  Probe
aacctactgtgtcaaggccagcctc

SEQ ID NO: 359227 - DNA, 25 bp, Artificial
  Probe
ctgaaaggcctgttttggagaggct

SEQ ID NO: 359228 - DNA, 25 bp, Artificial
  Probe
tcagtgatagtctgatcccaggtac

SEQ ID NO: 359229 - DNA, 25 bp, Artificial
  Probe
cctcagtgatagtctgatcccaggt

SEQ ID NO: 359230 - DNA, 25 bp, Artificial
  Probe
acctactgtgattcattgagcctga

SEQ ID NO: 359231 - DNA, 25 bp, Artificial
  Probe
gagcctgatttgacatgtaaataca

SEQ ID NO: 359232 - DNA, 25 bp, Artificial
  Probe
gtaaatacacctcaaatttggaaag

SEQ ID NO: 359233 - DNA, 25 bp, Artificial
  Probe
ctgatcccaggtacaaggccttgtg

SEQ ID NO: 359234 - DNA, 25 bp, Artificial
  Probe
aatacacctcaaatttggaaagttg

SEQ ID NO: 359235 - DNA, 25 bp, Artificial
  Probe
acctactgtgtcaaggccagcctca

SEQ ID NO: 359236 - DNA, 25 bp, Artificial
  Probe
actgtgattcattgagcctgatttg

SEQ ID NO: 359237 - DNA, 25 bp, Artificial
  Probe
agtgatagtctgatcccaggtacaa

SEQ ID NO: 359238 - DNA, 25 bp, Artificial
  Probe
tattgctcctcctgtttgggtccca

SEQ ID NO: 359239 - DNA, 25 bp, Artificial
  Probe
atcccaggtacaaggccttgtgagc

SEQ ID NO: 359240 - DNA, 25 bp, Artificial
  Probe
gtacaaggccttgtgagctgaggct

SEQ ID NO: 359241 - DNA, 25 bp, Artificial
  Probe
gatcccaggtacaaggccttgtgag

SEQ ID NO: 359242 - DNA, 25 bp, Artificial
  Probe
tacacctcaaatttggaaagttgcc

SEQ ID NO: 359243 - DNA, 25 bp, Artificial
  Probe
gatattgctcctcctgtttgggtcc

SEQ ID NO: 359244 - DNA, 25 bp, Artificial
  Probe
gtcccacctactgtgattcattgag

SEQ ID NO: 359245 - DNA, 25 bp, Artificial
  Probe
caacctactgtgtcaaggccagcct

SEQ ID NO: 359246 - DNA, 25 bp, Artificial
  Probe
cccagctcaacctactgtgtcaagg

SEQ ID NO: 359247 - DNA, 25 bp, Artificial
  Probe
tgatcccaggtacaaggccttgtga

SEQ ID NO: 359248 - DNA, 25 bp, Artificial
  Probe
cggatcatgtggtggctttatttct

SEQ ID NO: 359249 - DNA, 25 bp, Artificial
  Probe
ccttctcagcctgtaccaagtactg

SEQ ID NO: 359250 - DNA, 25 bp, Artificial
  Probe
aggaagctcttctttcagccacaac

SEQ ID NO: 359251 - DNA, 25 bp, Artificial
  Probe
attcaagaccggatcatgtggtggc

SEQ ID NO: 359252 - DNA, 25 bp, Artificial
  Probe
tcaacctgaggctccttttgcttac

SEQ ID NO: 359253 - DNA, 25 bp, Artificial
  Probe
tgtccatgactgtgcccctgattca

SEQ ID NO: 359254 - DNA, 25 bp, Artificial
  Probe
ctttggatgtggacccttctcagcc

SEQ ID NO: 359255 - DNA, 25 bp, Artificial
  Probe
cagcaaattgactttggatgtggac

SEQ ID NO: 359256 - DNA, 25 bp, Artificial
  Probe
gagcaggtcaacctgaggctccttt

SEQ ID NO: 359257 - DNA, 25 bp, Artificial
  Probe
tggacccttctcagcctgtaccaag

SEQ ID NO: 359258 - DNA, 25 bp, Artificial
  Probe
cttgcgatgaaatcactgagttctg

SEQ ID NO: 359259 - DNA, 25 bp, Artificial
  Probe
atgtggtggctttatttctacactt

SEQ ID NO: 359260 - DNA, 25 bp, Artificial
  Probe
caggtgctcggctcctgtgtgcctg

SEQ ID NO: 359261 - DNA, 25 bp, Artificial
  Probe
ttcaatttccacgagccaagtcctg

SEQ ID NO: 359262 - DNA, 25 bp, Artificial
  Probe
tttgcttacccgacatctaagttgt

SEQ ID NO: 359263 - DNA, 25 bp, Artificial
  Probe
aaagccatgtttagaacggaccagc

SEQ ID NO: 359264 - DNA, 25 bp, Artificial
  Probe
tcagtttcctgagcatcctttggag

SEQ ID NO: 359265 - DNA, 25 bp, Artificial
  Probe
cacaatggacagtctgaggaagctc

SEQ ID NO: 359266 - DNA, 25 bp, Artificial
  Probe
gaccagccaccttgcgatgaaatca

SEQ ID NO: 359267 - DNA, 25 bp, Artificial
  Probe
tgtttagaacggaccagccaccttg

SEQ ID NO: 359268 - DNA, 25 bp, Artificial
  Probe
tgagagccaggaatgcagagtcaat

SEQ ID NO: 359269 - DNA, 25 bp, Artificial
  Probe
ctggtgcttttcatttgttctaaga

SEQ ID NO: 359270 - DNA, 25 bp, Artificial
  Probe
gtttctccataagtcaaagccatgt

SEQ ID NO: 359271 - DNA, 25 bp, Artificial
  Probe
tgactgtgcccctgattcaagaccg

SEQ ID NO: 359272 - DNA, 25 bp, Artificial
  Probe
caggtcaacctgaggctccttttgc

SEQ ID NO: 359273 - DNA, 25 bp, Artificial
  Probe
taagtcaaagccatgtttagaacgg

SEQ ID NO: 359274 - DNA, 25 bp, Artificial
  Probe
cctttcagcaaattgactttggatg

SEQ ID NO: 359275 - DNA, 25 bp, Artificial
  Probe
tgtttctccataagtcaaagccatg

SEQ ID NO: 359276 - DNA, 25 bp, Artificial
  Probe
agctgagagccaggaatgcagagtc

SEQ ID NO: 359277 - DNA, 25 bp, Artificial
  Probe
gatgtggacccttctcagcctgtac

SEQ ID NO: 359278 - DNA, 25 bp, Artificial
  Probe
tcggctcctgtgtgcctggatgacg

SEQ ID NO: 359279 - DNA, 25 bp, Artificial
  Probe
gaagcaactttcaatttccacgagc

SEQ ID NO: 359280 - DNA, 25 bp, Artificial
  Probe
ggtggctttatttctacacttcttg

SEQ ID NO: 359281 - DNA, 25 bp, Artificial
  Probe
ttgtccaggtgctcggctcctgtgt

SEQ ID NO: 359282 - DNA, 25 bp, Artificial
  Probe
ccctgattcaagaccggatcatgtg

SEQ ID NO: 359283 - DNA, 25 bp, Artificial
  Probe
tacacttcttgtccacaatggacag

SEQ ID NO: 359284 - DNA, 25 bp, Artificial
  Probe
aagtactgcagttggctagggatgc

SEQ ID NO: 359285 - DNA, 25 bp, Artificial
  Probe
gagttctgaagcaactttcaatttc

SEQ ID NO: 359286 - DNA, 25 bp, Artificial
  Probe
gatgaaatcactgagttctgaagca

SEQ ID NO: 359287 - DNA, 25 bp, Artificial
  Probe
atggacagtctgaggaagctcttct

SEQ ID NO: 359288 - DNA, 25 bp, Artificial
  Probe
ggctccttttgcttacccgacatct

SEQ ID NO: 359289 - DNA, 25 bp, Artificial
  Probe
tgaagcaactttcaatttccacgag

SEQ ID NO: 359290 - DNA, 25 bp, Artificial
  Probe
ggggtctttcagtcaaagacttaca

SEQ ID NO: 359291 - DNA, 25 bp, Artificial
  Probe
cagtcaaagacttacattgaggtgg

SEQ ID NO: 359292 - DNA, 25 bp, Artificial
  Probe
gatagctgatgatcttaccatgtcc

SEQ ID NO: 359293 - DNA, 25 bp, Artificial
  Probe
ctaagagctgagagccaggaatgca

SEQ ID NO: 359294 - DNA, 25 bp, Artificial
  Probe
gcctctcgaacagtattctcctagt

SEQ ID NO: 359295 - DNA, 25 bp, Artificial
  Probe
agccagaaatgtgctggtaacagaa

SEQ ID NO: 359296 - DNA, 25 bp, Artificial
  Probe
acacaggatggacaagcccaccaac

SEQ ID NO: 359297 - DNA, 25 bp, Artificial
  Probe
atgagggactgctggcatgctgtac

SEQ ID NO: 359298 - DNA, 25 bp, Artificial
  Probe
gagatcttcactttagggggttcac

SEQ ID NO: 359299 - DNA, 25 bp, Artificial
  Probe
gatggctcctgaagccctttttgat

SEQ ID NO: 359300 - DNA, 25 bp, Artificial
  Probe
actgtacatgatgatgagggactgc

SEQ ID NO: 359301 - DNA, 25 bp, Artificial
  Probe
gccctttttgatagagtttacactc

SEQ ID NO: 359302 - DNA, 25 bp, Artificial
  Probe
ccaatgaactgtacatgatgatgag

SEQ ID NO: 359303 - DNA, 25 bp, Artificial
  Probe
cacgaatgggcgacttccagtcaag

SEQ ID NO: 359304 - DNA, 25 bp, Artificial
  Probe
aagacttggatcgaattctgactct

SEQ ID NO: 359305 - DNA, 25 bp, Artificial
  Probe
ctggcatgctgtaccctcacagagg

SEQ ID NO: 359306 - DNA, 25 bp, Artificial
  Probe
gtgttttctccagaccccatgcctt

SEQ ID NO: 359307 - DNA, 25 bp, Artificial
  Probe
attctgactctcacaaccaatgagg

SEQ ID NO: 359308 - DNA, 25 bp, Artificial
  Probe
ctagttaccccgacacaaggagctc

SEQ ID NO: 359309 - DNA, 25 bp, Artificial
  Probe
ctcctgaagccctttttgatagagt

SEQ ID NO: 359310 - DNA, 25 bp, Artificial
  Probe
ggatcgaattctgactctcacaacc

SEQ ID NO: 359311 - DNA, 25 bp, Artificial
  Probe
ggagatcttcactttagggggttca

SEQ ID NO: 359312 - DNA, 25 bp, Artificial
  Probe
tgtaccctcacagaggcccacgttt

SEQ ID NO: 359313 - DNA, 25 bp, Artificial
  Probe
gggacgattctgtgttttctccaga

SEQ ID NO: 359314 - DNA, 25 bp, Artificial
  Probe
atgtctggtccttcggggtgttaat

SEQ ID NO: 359315 - DNA, 25 bp, Artificial
  Probe
tcgagacttggcagccagaaatgtg

SEQ ID NO: 359316 - DNA, 25 bp, Artificial
  Probe
caactgcaccaatgaactgtacatg

SEQ ID NO: 359317 - DNA, 25 bp, Artificial
  Probe
ctcttgttcttcaggggacgattct

SEQ ID NO: 359318 - DNA, 25 bp, Artificial
  Probe
ctgtacatgatgatgagggactgct

SEQ ID NO: 359319 - DNA, 25 bp, Artificial
  Probe
gaacagtattctcctagttaccccg

SEQ ID NO: 359320 - DNA, 25 bp, Artificial
  Probe
tgatgtctggtccttcggggtgtta

SEQ ID NO: 359321 - DNA, 25 bp, Artificial
  Probe
tacaaaaagaccacgaatgggcgac

SEQ ID NO: 359322 - DNA, 25 bp, Artificial
  Probe
gatagcagactttggcctggccagg

SEQ ID NO: 359323 - DNA, 25 bp, Artificial
  Probe
cacgtttaagcagttggtggaagac

SEQ ID NO: 359324 - DNA, 25 bp, Artificial
  Probe
agctgctcaaagagggacacaggat

SEQ ID NO: 359325 - DNA, 25 bp, Artificial
  Probe
tcacagaggcccacgtttaagcagt

SEQ ID NO: 359326 - DNA, 25 bp, Artificial
  Probe
gtaccctcacagaggcccacgttta

SEQ ID NO: 359327 - DNA, 25 bp, Artificial
  Probe
tcagagtgatgtctggtccttcggg

SEQ ID NO: 359328 - DNA, 25 bp, Artificial
  Probe
caaccaatgaggaatacttggacct

SEQ ID NO: 359329 - DNA, 25 bp, Artificial
  Probe
gatagagtttacactcatcagagtg

SEQ ID NO: 359330 - DNA, 25 bp, Artificial
  Probe
tcccgtggaggaactttttaagctg

SEQ ID NO: 359331 - DNA, 25 bp, Artificial
  Probe
gttcttcaggggacgattctgtgtt

SEQ ID NO: 359332 - DNA, 25 bp, Artificial
  Probe
agcctctcgaacagtattctcctag

SEQ ID NO: 359333 - DNA, 25 bp, Artificial
  Probe
aagatagcagactttggcctggcca

SEQ ID NO: 359334 - DNA, 25 bp, Artificial
  Probe
cagactttggcctggccagggatat

SEQ ID NO: 359335 - DNA, 25 bp, Artificial
  Probe
gactattacaaaaagaccacgaatg

SEQ ID NO: 359336 - DNA, 25 bp, Artificial
  Probe
tgcctcagtatccacacataaacgg

SEQ ID NO: 359337 - DNA, 25 bp, Artificial
  Probe
cctggccagggatatcaacaacata

SEQ ID NO: 359338 - DNA, 25 bp, Artificial
  Probe
ggaactttttaagctgctcaaagag

SEQ ID NO: 359339 - DNA, 25 bp, Artificial
  Probe
tttggcctggccagggatatcaaca

SEQ ID NO: 359340 - DNA, 25 bp, Artificial
  Probe
gcctctcgaacagtattctcctagt

SEQ ID NO: 359341 - DNA, 25 bp, Artificial
  Probe
agccagaaatgtgctggtaacagaa

SEQ ID NO: 359342 - DNA, 25 bp, Artificial
  Probe
atgagggactgctggcatgctgtac

SEQ ID NO: 359343 - DNA, 25 bp, Artificial
  Probe
gatggctcctgaagccctttttgat

SEQ ID NO: 359344 - DNA, 25 bp, Artificial
  Probe
actgtacatgatgatgagggactgc

SEQ ID NO: 359345 - DNA, 25 bp, Artificial
  Probe
gagatcttcactttagggggttcac

SEQ ID NO: 359346 - DNA, 25 bp, Artificial
  Probe
gactctcacaaccaatgaggaatac

SEQ ID NO: 359347 - DNA, 25 bp, Artificial
  Probe
gccctttttgatagagtttacactc

SEQ ID NO: 359348 - DNA, 25 bp, Artificial
  Probe
tcaggggacgattctgtgttttctc

SEQ ID NO: 359349 - DNA, 25 bp, Artificial
  Probe
ccaatgaactgtacatgatgatgag

SEQ ID NO: 359350 - DNA, 25 bp, Artificial
  Probe
cacgaatgggcgacttccagtcaag

SEQ ID NO: 359351 - DNA, 25 bp, Artificial
  Probe
caagtggatggctcctgaagccctt

SEQ ID NO: 359352 - DNA, 25 bp, Artificial
  Probe
aagacttggatcgaattctgactct

SEQ ID NO: 359353 - DNA, 25 bp, Artificial
  Probe
ctggcatgctgtaccctcacagagg

SEQ ID NO: 359354 - DNA, 25 bp, Artificial
  Probe
tctcacaaccaatgaggaatacttg

SEQ ID NO: 359355 - DNA, 25 bp, Artificial
  Probe
gtgttttctccagaccccatgcctt

SEQ ID NO: 359356 - DNA, 25 bp, Artificial
  Probe
cagtcaagtggatggctcctgaagc

SEQ ID NO: 359357 - DNA, 25 bp, Artificial
  Probe
attctgactctcacaaccaatgagg

SEQ ID NO: 359358 - DNA, 25 bp, Artificial
  Probe
ctagttaccccgacacaaggagctc

SEQ ID NO: 359359 - DNA, 25 bp, Artificial
  Probe
ctcctgaagccctttttgatagagt

SEQ ID NO: 359360 - DNA, 25 bp, Artificial
  Probe
ggatcgaattctgactctcacaacc

SEQ ID NO: 359361 - DNA, 25 bp, Artificial
  Probe
ggagatcttcactttagggggttca

SEQ ID NO: 359362 - DNA, 25 bp, Artificial
  Probe
gggactgctggcatgctgtaccctc

SEQ ID NO: 359363 - DNA, 25 bp, Artificial
  Probe
tggatcgaattctgactctcacaac

SEQ ID NO: 359364 - DNA, 25 bp, Artificial
  Probe
tgtaccctcacagaggcccacgttt

SEQ ID NO: 359365 - DNA, 25 bp, Artificial
  Probe
gggacgattctgtgttttctccaga

SEQ ID NO: 359366 - DNA, 25 bp, Artificial
  Probe
atgtctggtccttcggggtgttaat

SEQ ID NO: 359367 - DNA, 25 bp, Artificial
  Probe
caactgcaccaatgaactgtacatg

SEQ ID NO: 359368 - DNA, 25 bp, Artificial
  Probe
ctcttgttcttcaggggacgattct

SEQ ID NO: 359369 - DNA, 25 bp, Artificial
  Probe
ctgtacatgatgatgagggactgct

SEQ ID NO: 359370 - DNA, 25 bp, Artificial
  Probe
gaacagtattctcctagttaccccg

SEQ ID NO: 359371 - DNA, 25 bp, Artificial
  Probe
tgatgtctggtccttcggggtgtta

SEQ ID NO: 359372 - DNA, 25 bp, Artificial
  Probe
tacaaaaagaccacgaatgggcgac

SEQ ID NO: 359373 - DNA, 25 bp, Artificial
  Probe
cacgtttaagcagttggtggaagac

SEQ ID NO: 359374 - DNA, 25 bp, Artificial
  Probe
tcacagaggcccacgtttaagcagt

SEQ ID NO: 359375 - DNA, 25 bp, Artificial
  Probe
gtaccctcacagaggcccacgttta

SEQ ID NO: 359376 - DNA, 25 bp, Artificial
  Probe
tcagagtgatgtctggtccttcggg

SEQ ID NO: 359377 - DNA, 25 bp, Artificial
  Probe
caaccaatgaggaatacttggacct

SEQ ID NO: 359378 - DNA, 25 bp, Artificial
  Probe
gatagagtttacactcatcagagtg

SEQ ID NO: 359379 - DNA, 25 bp, Artificial
  Probe
tcccgtggaggaactttttaagctg

SEQ ID NO: 359380 - DNA, 25 bp, Artificial
  Probe
gttcttcaggggacgattctgtgtt

SEQ ID NO: 359381 - DNA, 25 bp, Artificial
  Probe
agcctctcgaacagtattctcctag

SEQ ID NO: 359382 - DNA, 25 bp, Artificial
  Probe
gactattacaaaaagaccacgaatg

SEQ ID NO: 359383 - DNA, 25 bp, Artificial
  Probe
tgcctcagtatccacacataaacgg

SEQ ID NO: 359384 - DNA, 25 bp, Artificial
  Probe
ggaactttttaagctgctcaaagag

SEQ ID NO: 359385 - DNA, 25 bp, Artificial
  Probe
aactttttaagctgctcaaagaggg

SEQ ID NO: 359386 - DNA, 25 bp, Artificial
  Probe
gtttacatcaaagcacgttgtttat

SEQ ID NO: 359387 - DNA, 25 bp, Artificial
  Probe
ggtactctggcctcaaatcctaaac

SEQ ID NO: 359388 - DNA, 25 bp, Artificial
  Probe
accttgcagaaagatgggagacggc

SEQ ID NO: 359389 - DNA, 25 bp, Artificial
  Probe
ctaccaacagcctaagaaggggatc

SEQ ID NO: 359390 - DNA, 25 bp, Artificial
  Probe
aagcccaggggctgtcctcttagcc

SEQ ID NO: 359391 - DNA, 25 bp, Artificial
  Probe
tccacggtgtcctggcctctctggt

SEQ ID NO: 359392 - DNA, 25 bp, Artificial
  Probe
tctcactgagacctggcagcacagg

SEQ ID NO: 359393 - DNA, 25 bp, Artificial
  Probe
aaccaagaatcactgtgtttacatg

SEQ ID NO: 359394 - DNA, 25 bp, Artificial
  Probe
tgctatacagcctctccacggtgtc

SEQ ID NO: 359395 - DNA, 25 bp, Artificial
  Probe
gaggaagccacttctaaccgggagt

SEQ ID NO: 359396 - DNA, 25 bp, Artificial
  Probe
tactggggtttacatcaaagcacgt

SEQ ID NO: 359397 - DNA, 25 bp, Artificial
  Probe
atacagcctctccacggtgtcctgg

SEQ ID NO: 359398 - DNA, 25 bp, Artificial
  Probe
aatcccatggccatttttctgtggt

SEQ ID NO: 359399 - DNA, 25 bp, Artificial
  Probe
gggattaatcccatggccatttttc

SEQ ID NO: 359400 - DNA, 25 bp, Artificial
  Probe
caaagcacgttgtttatacaactga

SEQ ID NO: 359401 - DNA, 25 bp, Artificial
  Probe
ggatcaagggactcttgttctttta

SEQ ID NO: 359402 - DNA, 25 bp, Artificial
  Probe
tcactgtgtttacatgaaatgacaa

SEQ ID NO: 359403 - DNA, 25 bp, Artificial
  Probe
taaagagtttgctaccaacagccta

SEQ ID NO: 359404 - DNA, 25 bp, Artificial
  Probe
ctggaaggcctggtaagccaggtcc

SEQ ID NO: 359405 - DNA, 25 bp, Artificial
  Probe
ctatgggtcaggagaccttgcagaa

SEQ ID NO: 359406 - DNA, 25 bp, Artificial
  Probe
gctatgggtcaggagaccttgcaga

SEQ ID NO: 359407 - DNA, 25 bp, Artificial
  Probe
ctggtgctttctacgggaacatcat

SEQ ID NO: 359408 - DNA, 25 bp, Artificial
  Probe
tggaaggcctggtaagccaggtcct

SEQ ID NO: 359409 - DNA, 25 bp, Artificial
  Probe
tctgtggtactctggcctcaaatcc

SEQ ID NO: 359410 - DNA, 25 bp, Artificial
  Probe
caagaatcactgtgtttacatgaaa

SEQ ID NO: 359411 - DNA, 25 bp, Artificial
  Probe
aacagcctaagaaggggatcaaggg

SEQ ID NO: 359412 - DNA, 25 bp, Artificial
  Probe
caagggactcttgttcttttataag

SEQ ID NO: 359413 - DNA, 25 bp, Artificial
  Probe
ggtcaggagaccttgcagaaagatg

SEQ ID NO: 359414 - DNA, 25 bp, Artificial
  Probe
agacctggcagcacaggtgctggaa

SEQ ID NO: 359415 - DNA, 25 bp, Artificial
  Probe
gagacggcccttttccacacatgca

SEQ ID NO: 359416 - DNA, 25 bp, Artificial
  Probe
gtcctcctggtaagcccaggggctg

SEQ ID NO: 359417 - DNA, 25 bp, Artificial
  Probe
cctggtaagcccaggggctgtcctc

SEQ ID NO: 359418 - DNA, 25 bp, Artificial
  Probe
gatttctggggcactctcactgaga

SEQ ID NO: 359419 - DNA, 25 bp, Artificial
  Probe
ttgttactggggtttacatcaaagc

SEQ ID NO: 359420 - DNA, 25 bp, Artificial
  Probe
ctgactgatttctggggcactctca

SEQ ID NO: 359421 - DNA, 25 bp, Artificial
  Probe
tttgctaccaacagcctaagaaggg

SEQ ID NO: 359422 - DNA, 25 bp, Artificial
  Probe
gctttctacgggaacatcatcctga

SEQ ID NO: 359423 - DNA, 25 bp, Artificial
  Probe
gggtttacatcaaagcacgttgttt

SEQ ID NO: 359424 - DNA, 25 bp, Artificial
  Probe
gcctggtaagccaggtcctgtcctc

SEQ ID NO: 359425 - DNA, 25 bp, Artificial
  Probe
ggtgtcctggcctctctggtgcttt

SEQ ID NO: 359426 - DNA, 25 bp, Artificial
  Probe
tctaaccgggagtaaagagtttgct

SEQ ID NO: 359427 - DNA, 25 bp, Artificial
  Probe
ttcagagactccagggtggacagag

SEQ ID NO: 359428 - DNA, 25 bp, Artificial
  Probe
ggagacggcccttttccacacatgc

SEQ ID NO: 359429 - DNA, 25 bp, Artificial
  Probe
ggattaatcccatggccatttttct

SEQ ID NO: 359430 - DNA, 25 bp, Artificial
  Probe
ctgagacctggcagcacaggtgctg

SEQ ID NO: 359431 - DNA, 25 bp, Artificial
  Probe
ttttccacacatgcacagccagcag

SEQ ID NO: 359432 - DNA, 25 bp, Artificial
  Probe
gagattgatctggtcaaccgcgacc

SEQ ID NO: 359433 - DNA, 25 bp, Artificial
  Probe
tcggcatccctatggcgctcatctg

SEQ ID NO: 359434 - DNA, 25 bp, Artificial
  Probe
gggacatctctacactgttcccatc

SEQ ID NO: 359435 - DNA, 25 bp, Artificial
  Probe
atcctctctttcctgcacatctggg

SEQ ID NO: 359436 - DNA, 25 bp, Artificial
  Probe
agatattcagcaatattccgatcag

SEQ ID NO: 359437 - DNA, 25 bp, Artificial
  Probe
cttcactgtgacaaaatattggttt

SEQ ID NO: 359438 - DNA, 25 bp, Artificial
  Probe
tgtaccgtgcatcaagagcttcctg

SEQ ID NO: 359439 - DNA, 25 bp, Artificial
  Probe
ttcggcatccctatggcgctcatct

SEQ ID NO: 359440 - DNA, 25 bp, Artificial
  Probe
tctctacactgttcccatccgggaa

SEQ ID NO: 359441 - DNA, 25 bp, Artificial
  Probe
atctctacactgttcccatccggga

SEQ ID NO: 359442 - DNA, 25 bp, Artificial
  Probe
cacacagtttcgacggcatctggaa

SEQ ID NO: 359443 - DNA, 25 bp, Artificial
  Probe
caaggccatggcagacgaggtgaat

SEQ ID NO: 359444 - DNA, 25 bp, Artificial
  Probe
cttgctgtctaccatcttcggcatc

SEQ ID NO: 359445 - DNA, 25 bp, Artificial
  Probe
cctatggcgctcatctggggcatct

SEQ ID NO: 359446 - DNA, 25 bp, Artificial
  Probe
acaacaaggccatggcagacgaggt

SEQ ID NO: 359447 - DNA, 25 bp, Artificial
  Probe
ttcccatccgggaacagggcaacat

SEQ ID NO: 359448 - DNA, 25 bp, Artificial
  Probe
aatattggttttaccgcttgctgtc

SEQ ID NO: 359449 - DNA, 25 bp, Artificial
  Probe
agcccaacaacaaggccatggcaga

SEQ ID NO: 359450 - DNA, 25 bp, Artificial
  Probe
ttgatctggtcaaccgcgaccccaa

SEQ ID NO: 359451 - DNA, 25 bp, Artificial
  Probe
caccaaggagattgatctggtcaac

SEQ ID NO: 359452 - DNA, 25 bp, Artificial
  Probe
gattcagtgcatcagccgtgtctat

SEQ ID NO: 359453 - DNA, 25 bp, Artificial
  Probe
cccatccgggaacagggcaacatct

SEQ ID NO: 359454 - DNA, 25 bp, Artificial
  Probe
ttcctgcacatctgggcagttgtac

SEQ ID NO: 359455 - DNA, 25 bp, Artificial
  Probe
agcaagtgtacgacgcgcacaccaa

SEQ ID NO: 359456 - DNA, 25 bp, Artificial
  Probe
gtgcatcagccgtgtctattccatc

SEQ ID NO: 359457 - DNA, 25 bp, Artificial
  Probe
gaacagggcaacatctacaagccca

SEQ ID NO: 359458 - DNA, 25 bp, Artificial
  Probe
attcagcaatattccgatcagcacg

SEQ ID NO: 359459 - DNA, 25 bp, Artificial
  Probe
tggaaggccagcttcaccaccttca

SEQ ID NO: 359460 - DNA, 25 bp, Artificial
  Probe
agtttcgacggcatctggaaggcca

SEQ ID NO: 359461 - DNA, 25 bp, Artificial
  Probe
aagcaagtgtacgacgcgcacacca

SEQ ID NO: 359462 - DNA, 25 bp, Artificial
  Probe
gggcaacatctacaagcccaacaac

SEQ ID NO: 359463 - DNA, 25 bp, Artificial
  Probe
atctggaaggccagcttcaccacct

SEQ ID NO: 359464 - DNA, 25 bp, Artificial
  Probe
attcagtgcatcagccgtgtctatt

SEQ ID NO: 359465 - DNA, 25 bp, Artificial
  Probe
tgattgcggaaccagaagggacaca

SEQ ID NO: 359466 - DNA, 25 bp, Artificial
  Probe
gcacatctgggcagttgtaccgtgc

SEQ ID NO: 359467 - DNA, 25 bp, Artificial
  Probe
tgtacgacgcgcacaccaaggagat

SEQ ID NO: 359468 - DNA, 25 bp, Artificial
  Probe
ctacaagcccaacaacaaggccatg

SEQ ID NO: 359469 - DNA, 25 bp, Artificial
  Probe
cgacgacgtggtcaagattgacttt

SEQ ID NO: 359470 - DNA, 25 bp, Artificial
  Probe
ccatggcagacgaggtgaatgagaa

SEQ ID NO: 359471 - DNA, 25 bp, Artificial
  Probe
acggcatctggaaggccagcttcac

SEQ ID NO: 359472 - DNA, 25 bp, Artificial
  Probe
cccaagcatctcaacgacgacgtgg

SEQ ID NO: 359473 - DNA, 25 bp, Artificial
  Probe
caccttcactgtgacaaaatattgg

SEQ ID NO: 359474 - DNA, 25 bp, Artificial
  Probe
atggcgctcatctggggcatctact

SEQ ID NO: 359475 - DNA, 25 bp, Artificial
  Probe
gaaccagaagggacacacagtttcg

SEQ ID NO: 359476 - DNA, 25 bp, Artificial
  Probe
gccgtgtctattccatctacgtcca

SEQ ID NO: 359477 - DNA, 25 bp, Artificial
  Probe
gttttaccgcttgctgtctaccatc

SEQ ID NO: 359478 - DNA, 25 bp, Artificial
  Probe
tcccttcagtaagaaaaccttggct

SEQ ID NO: 359479 - DNA, 25 bp, Artificial
  Probe
cccagcctcagtaggcttttacaaa

SEQ ID NO: 359480 - DNA, 25 bp, Artificial
  Probe
ggcagggcctaagcactcagataag

SEQ ID NO: 359481 - DNA, 25 bp, Artificial
  Probe
tgagaccaggagtcccaggcaaggc

SEQ ID NO: 359482 - DNA, 25 bp, Artificial
  Probe
gaccttcaggcctgtgtagaaatgg

SEQ ID NO: 359483 - DNA, 25 bp, Artificial
  Probe
ggagtcccaggcaaggcctaggtcc

SEQ ID NO: 359484 - DNA, 25 bp, Artificial
  Probe
tgggatctcccaaatccggggccct

SEQ ID NO: 359485 - DNA, 25 bp, Artificial
  Probe
gagtcccaggcaaggcctaggtcct

SEQ ID NO: 359486 - DNA, 25 bp, Artificial
  Probe
tacaaatgaaccagaccttcaggcc

SEQ ID NO: 359487 - DNA, 25 bp, Artificial
  Probe
acagaatgtggctgcttcaaagaca

SEQ ID NO: 359488 - DNA, 25 bp, Artificial
  Probe
aatgtggctgcttcaaagacagatg

SEQ ID NO: 359489 - DNA, 25 bp, Artificial
  Probe
aggcctaggtcctcccttcagtaag

SEQ ID NO: 359490 - DNA, 25 bp, Artificial
  Probe
aatgacagtgacagcagtgtgggct

SEQ ID NO: 359491 - DNA, 25 bp, Artificial
  Probe
agcactcagataaggtatttccccc

SEQ ID NO: 359492 - DNA, 25 bp, Artificial
  Probe
tgtgttacaggtaacaccaactaat

SEQ ID NO: 359493 - DNA, 25 bp, Artificial
  Probe
ctagtcatgtttgactggaatctgt

SEQ ID NO: 359494 - DNA, 25 bp, Artificial
  Probe
gggccctgacagaatgtggctgctt

SEQ ID NO: 359495 - DNA, 25 bp, Artificial
  Probe
tttacaaatgaaccagaccttcagg

SEQ ID NO: 359496 - DNA, 25 bp, Artificial
  Probe
gaaccagaccttcaggcctgtgtag

SEQ ID NO: 359497 - DNA, 25 bp, Artificial
  Probe
aatccggggccctgacagaatgtgg

SEQ ID NO: 359498 - DNA, 25 bp, Artificial
  Probe
agacctagtcatgtttgactggaat

SEQ ID NO: 359499 - DNA, 25 bp, Artificial
  Probe
ctggtagttgtgttacaggtaacac

SEQ ID NO: 359500 - DNA, 25 bp, Artificial
  Probe
accaggagtcccaggcaaggcctag

SEQ ID NO: 359501 - DNA, 25 bp, Artificial
  Probe
ccttcagtaagaaaaccttggctct

SEQ ID NO: 359502 - DNA, 25 bp, Artificial
  Probe
tcagtaggcttttacaaatgaacca

SEQ ID NO: 359503 - DNA, 25 bp, Artificial
  Probe
cctgacagaatgtggctgcttcaaa

SEQ ID NO: 359504 - DNA, 25 bp, Artificial
  Probe
ctgcagtcattaggactaagaaagc

SEQ ID NO: 359505 - DNA, 25 bp, Artificial
  Probe
acctagtcatgtttgactggaatct

SEQ ID NO: 359506 - DNA, 25 bp, Artificial
  Probe
tcaggcctgtgtagaaatggagctg

SEQ ID NO: 359507 - DNA, 25 bp, Artificial
  Probe
agctggatcacagagatgaatgaca

SEQ ID NO: 359508 - DNA, 25 bp, Artificial
  Probe
gagctggatcacagagatgaatgac

SEQ ID NO: 359509 - DNA, 25 bp, Artificial
  Probe
atgaaccagaccttcaggcctgtgt

SEQ ID NO: 359510 - DNA, 25 bp, Artificial
  Probe
gaaagcattgagaccaggagtccca

SEQ ID NO: 359511 - DNA, 25 bp, Artificial
  Probe
gcaaggcctaggtcctcccttcagt

SEQ ID NO: 359512 - DNA, 25 bp, Artificial
  Probe
aaccagaccttcaggcctgtgtaga

SEQ ID NO: 359513 - DNA, 25 bp, Artificial
  Probe
gcctcagtaggcttttacaaatgaa

SEQ ID NO: 359514 - DNA, 25 bp, Artificial
  Probe
aggtgcccaacctggcagacctagt

SEQ ID NO: 359515 - DNA, 25 bp, Artificial
  Probe
cagtgtgggctgcagtcattaggac

SEQ ID NO: 359516 - DNA, 25 bp, Artificial
  Probe
tccggggccctgacagaatgtggct

SEQ ID NO: 359517 - DNA, 25 bp, Artificial
  Probe
cttcagtaagaaaaccttggctctt

SEQ ID NO: 359518 - DNA, 25 bp, Artificial
  Probe
ggatctcccaaatccggggccctga

SEQ ID NO: 359519 - DNA, 25 bp, Artificial
  Probe
gcccaacctggcagacctagtcatg

SEQ ID NO: 359520 - DNA, 25 bp, Artificial
  Probe
ggcttttacaaatgaaccagacctt

SEQ ID NO: 359521 - DNA, 25 bp, Artificial
  Probe
agtaagaaaaccttggctcttgtct

SEQ ID NO: 359522 - DNA, 25 bp, Artificial
  Probe
caaatgaaccagaccttcaggcctg

SEQ ID NO: 359523 - DNA, 25 bp, Artificial
  Probe
caaggcctaggtcctcccttcagta

SEQ ID NO: 359524 - DNA, 25 bp, Artificial
  Probe
ctctgtgcaatttgtaaacagaaat

SEQ ID NO: 359525 - DNA, 25 bp, Artificial
  Probe
aagagctcagctggtggcttacccg

SEQ ID NO: 359526 - DNA, 25 bp, Artificial
  Probe
taacctaatggcacaaagtcttaga

SEQ ID NO: 359527 - DNA, 25 bp, Artificial
  Probe
gacatgtatttcttacgtacactgt

SEQ ID NO: 359528 - DNA, 25 bp, Artificial
  Probe
ttggatacatcacttgccaatgtac

SEQ ID NO: 359529 - DNA, 25 bp, Artificial
  Probe
acttctctgtgcaatttgtaaacag

SEQ ID NO: 359530 - DNA, 25 bp, Artificial
  Probe
atgcagacatgtatttcttacgtac

SEQ ID NO: 359531 - DNA, 25 bp, Artificial
  Probe
gggaggctcgaccacctcaacattg

SEQ ID NO: 359532 - DNA, 25 bp, Artificial
  Probe
ctgggaggctcgaccacctcaacat

SEQ ID NO: 359533 - DNA, 25 bp, Artificial
  Probe
ggatacatcacttgccaatgtacat

SEQ ID NO: 359534 - DNA, 25 bp, Artificial
  Probe
aatgcttcatgcaggccattttgaa

SEQ ID NO: 359535 - DNA, 25 bp, Artificial
  Probe
ccctgtgttccctgttcttcgttgc

SEQ ID NO: 359536 - DNA, 25 bp, Artificial
  Probe
tccttttcctgttccatggcttctg

SEQ ID NO: 359537 - DNA, 25 bp, Artificial
  Probe
gacatactcaggataacagagaatg

SEQ ID NO: 359538 - DNA, 25 bp, Artificial
  Probe
tcgttgctgcattttcttcacttgc

SEQ ID NO: 359539 - DNA, 25 bp, Artificial
  Probe
tccatggcttctgtgagtaggagag

SEQ ID NO: 359540 - DNA, 25 bp, Artificial
  Probe
ctgtacttctctgtgcaatttgtaa

SEQ ID NO: 359541 - DNA, 25 bp, Artificial
  Probe
ttcatgcaggccattttgaaatgag

SEQ ID NO: 359542 - DNA, 25 bp, Artificial
  Probe
acactgtacttctctgtgcaatttg

SEQ ID NO: 359543 - DNA, 25 bp, Artificial
  Probe
tttcctgttccatggcttctgtgag

SEQ ID NO: 359544 - DNA, 25 bp, Artificial
  Probe
attggatacatcacttgccaatgta

SEQ ID NO: 359545 - DNA, 25 bp, Artificial
  Probe
ggattctgtaatgcttcatgcaggc

SEQ ID NO: 359546 - DNA, 25 bp, Artificial
  Probe
tgaagagctcagctggtggcttacc

SEQ ID NO: 359547 - DNA, 25 bp, Artificial
  Probe
ccctgttcttcgttgctgcattttc

SEQ ID NO: 359548 - DNA, 25 bp, Artificial
  Probe
tgtgccctgtgttccctgttcttcg

SEQ ID NO: 359549 - DNA, 25 bp, Artificial
  Probe
cagacttggctctcgataaactttt

SEQ ID NO: 359550 - DNA, 25 bp, Artificial
  Probe
ggttcttacatgcatccttttcctg

SEQ ID NO: 359551 - DNA, 25 bp, Artificial
  Probe
gttggttcttacatgcatccttttc

SEQ ID NO: 359552 - DNA, 25 bp, Artificial
  Probe
gttccctgttcttcgttgctgcatt

SEQ ID NO: 359553 - DNA, 25 bp, Artificial
  Probe
tattatgtgccctgtgttccctgtt

SEQ ID NO: 359554 - DNA, 25 bp, Artificial
  Probe
gtgtgcagtggtccaggattctgta

SEQ ID NO: 359555 - DNA, 25 bp, Artificial
  Probe
tccaggattctgtaatgcttcatgc

SEQ ID NO: 359556 - DNA, 25 bp, Artificial
  Probe
catgcatccttttcctgttccatgg

SEQ ID NO: 359557 - DNA, 25 bp, Artificial
  Probe
gcatccttttcctgttccatggctt

SEQ ID NO: 359558 - DNA, 25 bp, Artificial
  Probe
gaggctcgaccacctcaacattgga

SEQ ID NO: 359559 - DNA, 25 bp, Artificial
  Probe
catactcaggataacagagaatggt

SEQ ID NO: 359560 - DNA, 25 bp, Artificial
  Probe
catgcaggccattttgaaatgagaa

SEQ ID NO: 359561 - DNA, 25 bp, Artificial
  Probe
agacatgtatttcttacgtacactg

SEQ ID NO: 359562 - DNA, 25 bp, Artificial
  Probe
ctgttccatggcttctgtgagtagg

SEQ ID NO: 359563 - DNA, 25 bp, Artificial
  Probe
gacagacttggctctcgataaactt

SEQ ID NO: 359564 - DNA, 25 bp, Artificial
  Probe
ctaatggcacaaagtcttagaatat

SEQ ID NO: 359565 - DNA, 25 bp, Artificial
  Probe
tgttgaagagctcagctggtggctt

SEQ ID NO: 359566 - DNA, 25 bp, Artificial
  Probe
atatgcagacatgtatttcttacgt

SEQ ID NO: 359567 - DNA, 25 bp, Artificial
  Probe
gagttggttcttacatgcatccttt

SEQ ID NO: 359568 - DNA, 25 bp, Artificial
  Probe
cttacgtacactgtacttctctgtg

SEQ ID NO: 359569 - DNA, 25 bp, Artificial
  Probe
gaacccaattttcttatggacagat

SEQ ID NO: 359570 - DNA, 25 bp, Artificial
  Probe
tcttagaccacgatccttcctgaag

SEQ ID NO: 359571 - DNA, 25 bp, Artificial
  Probe
atccttcctgaagcatcagggagcc

SEQ ID NO: 359572 - DNA, 25 bp, Artificial
  Probe
ttagaccacgatccttcctgaagca

SEQ ID NO: 359573 - DNA, 25 bp, Artificial
  Probe
ctggatcttaagttccagaaaaagt

SEQ ID NO: 359574 - DNA, 25 bp, Artificial
  Probe
ccttcctgaagcatcagggagcctg

SEQ ID NO: 359575 - DNA, 25 bp, Artificial
  Probe
tcagggagcctggatcttaagttcc

SEQ ID NO: 359576 - DNA, 25 bp, Artificial
  Probe
tagaccacgatccttcctgaagcat

SEQ ID NO: 359577 - DNA, 25 bp, Artificial
  Probe
cagggagcctggatcttaagttcca

SEQ ID NO: 359578 - DNA, 25 bp, Artificial
  Probe
accacgatccttcctgaagcatcag

SEQ ID NO: 359579 - DNA, 25 bp, Artificial
  Probe
tgctgaatgttcttagaccacgatc

SEQ ID NO: 359580 - DNA, 25 bp, Artificial
  Probe
ctgaatgttcttagaccacgatcct

SEQ ID NO: 359581 - DNA, 25 bp, Artificial
  Probe
cgatccttcctgaagcatcagggag

SEQ ID NO: 359582 - DNA, 25 bp, Artificial
  Probe
ggagcctggatcttaagttccagaa

SEQ ID NO: 359583 - DNA, 25 bp, Artificial
  Probe
gatccttcctgaagcatcagggagc

SEQ ID NO: 359584 - DNA, 25 bp, Artificial
  Probe
agcatcagggagcctggatcttaag

SEQ ID NO: 359585 - DNA, 25 bp, Artificial
  Probe
cctgctgaatgttcttagaccacga

SEQ ID NO: 359586 - DNA, 25 bp, Artificial
  Probe
tgaagcatcagggagcctggatctt

SEQ ID NO: 359587 - DNA, 25 bp, Artificial
  Probe
tgaatgttcttagaccacgatcctt

SEQ ID NO: 359588 - DNA, 25 bp, Artificial
  Probe
gggagcctggatcttaagttccaga

SEQ ID NO: 359589 - DNA, 25 bp, Artificial
  Probe
gaccacgatccttcctgaagcatca

SEQ ID NO: 359590 - DNA, 25 bp, Artificial
  Probe
atcagggagcctggatcttaagttc

SEQ ID NO: 359591 - DNA, 25 bp, Artificial
  Probe
agcctggatcttaagttccagaaaa

SEQ ID NO: 359592 - DNA, 25 bp, Artificial
  Probe
ctgctgaatgttcttagaccacgat

SEQ ID NO: 359593 - DNA, 25 bp, Artificial
  Probe
cttcctgaagcatcagggagcctgg

SEQ ID NO: 359594 - DNA, 25 bp, Artificial
  Probe
cttagaccacgatccttcctgaagc

SEQ ID NO: 359595 - DNA, 25 bp, Artificial
  Probe
gcctggatcttaagttccagaaaaa

SEQ ID NO: 359596 - DNA, 25 bp, Artificial
  Probe
ttttgttcttgttttcttttgccat

SEQ ID NO: 359597 - DNA, 25 bp, Artificial
  Probe
gaagcatcagggagcctggatctta

SEQ ID NO: 359598 - DNA, 25 bp, Artificial
  Probe
gttcttagaccacgatccttcctga

SEQ ID NO: 359599 - DNA, 25 bp, Artificial
  Probe
gaatgttcttagaccacgatccttc

SEQ ID NO: 359600 - DNA, 25 bp, Artificial
  Probe
gcatcagggagcctggatcttaagt

SEQ ID NO: 359601 - DNA, 25 bp, Artificial
  Probe
cctggatcttaagttccagaaaaag

SEQ ID NO: 359602 - DNA, 25 bp, Artificial
  Probe
atgttcttagaccacgatccttcct

SEQ ID NO: 359603 - DNA, 25 bp, Artificial
  Probe
tccttcctgaagcatcagggagcct

SEQ ID NO: 359604 - DNA, 25 bp, Artificial
  Probe
agggagcctggatcttaagttccag

SEQ ID NO: 359605 - DNA, 25 bp, Artificial
  Probe
ccacgatccttcctgaagcatcagg

SEQ ID NO: 359606 - DNA, 25 bp, Artificial
  Probe
aatgttcttagaccacgatccttcc

SEQ ID NO: 359607 - DNA, 25 bp, Artificial
  Probe
tggatcttaagttccagaaaaagtt

SEQ ID NO: 359608 - DNA, 25 bp, Artificial
  Probe
ttcttagaccacgatccttcctgaa

SEQ ID NO: 359609 - DNA, 25 bp, Artificial
  Probe
tgttcttagaccacgatccttcctg

SEQ ID NO: 359610 - DNA, 25 bp, Artificial
  Probe
cctgaagcatcagggagcctggatc

SEQ ID NO: 359611 - DNA, 25 bp, Artificial
  Probe
gagcctggatcttaagttccagaaa

SEQ ID NO: 359612 - DNA, 25 bp, Artificial
  Probe
catcagggagcctggatcttaagtt

SEQ ID NO: 359613 - DNA, 25 bp, Artificial
  Probe
ttcctgaagcatcagggagcctgga

SEQ ID NO: 359614 - DNA, 25 bp, Artificial
  Probe
agaccacgatccttcctgaagcatc

SEQ ID NO: 359615 - DNA, 25 bp, Artificial
  Probe
tcctgaagcatcagggagcctggat

SEQ ID NO: 359616 - DNA, 25 bp, Artificial
  Probe
aatgtccagagctgctgggaggccc

SEQ ID NO: 359617 - DNA, 25 bp, Artificial
  Probe
cagaggccgggtgcagaactgctcc

SEQ ID NO: 359618 - DNA, 25 bp, Artificial
  Probe
cagcagccccttggtggcctcgagg

SEQ ID NO: 359619 - DNA, 25 bp, Artificial
  Probe
aagataagtgacttcggctgctccc

SEQ ID NO: 359620 - DNA, 25 bp, Artificial
  Probe
tccctgactgggaagacgctgcaga

SEQ ID NO: 359621 - DNA, 25 bp, Artificial
  Probe
tctgcgccctcactggcaggcggtg

SEQ ID NO: 359622 - DNA, 25 bp, Artificial
  Probe
aaggcggaaaccttcagccatgctt

SEQ ID NO: 359623 - DNA, 25 bp, Artificial
  Probe
gccctcactggcaggcggtgttcac

SEQ ID NO: 359624 - DNA, 25 bp, Artificial
  Probe
ggaggtgccttactccggcgagcct

SEQ ID NO: 359625 - DNA, 25 bp, Artificial
  Probe
agctgcagagagcaactgagtttgg

SEQ ID NO: 359626 - DNA, 25 bp, Artificial
  Probe
ggtgtaatgccttcgcctctcatcc

SEQ ID NO: 359627 - DNA, 25 bp, Artificial
  Probe
agcaactgagtttgggaaagtgcct

SEQ ID NO: 359628 - DNA, 25 bp, Artificial
  Probe
cactcacaaagcattttgcacttgg

SEQ ID NO: 359629 - DNA, 25 bp, Artificial
  Probe
agcattttgcacttggacctgaagc

SEQ ID NO: 359630 - DNA, 25 bp, Artificial
  Probe
ccaaagccgacatctactcttttgg

SEQ ID NO: 359631 - DNA, 25 bp, Artificial
  Probe
gggggcacgtacacgcaccaagctc

SEQ ID NO: 359632 - DNA, 25 bp, Artificial
  Probe
agtttgggggcaatgtgactctaca

SEQ ID NO: 359633 - DNA, 25 bp, Artificial
  Probe
accaagctccggagctcctgaaagg

SEQ ID NO: 359634 - DNA, 25 bp, Artificial
  Probe
gaaagtgcctcaagtattccctaga

SEQ ID NO: 359635 - DNA, 25 bp, Artificial
  Probe
tcaccctgtggcagatgaccaccag

SEQ ID NO: 359636 - DNA, 25 bp, Artificial
  Probe
ctaagactaacgagggtacagatat

SEQ ID NO: 359637 - DNA, 25 bp, Artificial
  Probe
acatcgggggcacgtacacgcacca

SEQ ID NO: 359638 - DNA, 25 bp, Artificial
  Probe
tgcctgctgcataggctgggttctg

SEQ ID NO: 359639 - DNA, 25 bp, Artificial
  Probe
ccactcacggttgttaaacaacctg

SEQ ID NO: 359640 - DNA, 25 bp, Artificial
  Probe
cccagagcctctcagctgcagagag

SEQ ID NO: 359641 - DNA, 25 bp, Artificial
  Probe
gatatcatgggcaccactcacggtt

SEQ ID NO: 359642 - DNA, 25 bp, Artificial
  Probe
cagcgaacattttgatcagtgagaa

SEQ ID NO: 359643 - DNA, 25 bp, Artificial
  Probe
agccatgcttccaaacttccctggg

SEQ ID NO: 359644 - DNA, 25 bp, Artificial
  Probe
acctgaaggctttccgaggggcact

SEQ ID NO: 359645 - DNA, 25 bp, Artificial
  Probe
tagatattgttaacggcctgctttt

SEQ ID NO: 359646 - DNA, 25 bp, Artificial
  Probe
tggtagcctacaatctgcgccctca

SEQ ID NO: 359647 - DNA, 25 bp, Artificial
  Probe
cttactccggcgagcctcagtacgt

SEQ ID NO: 359648 - DNA, 25 bp, Artificial
  Probe
cagataagcttttcgtttctgttta

SEQ ID NO: 359649 - DNA, 25 bp, Artificial
  Probe
gttgtggctgccagcacgcgcacgc

SEQ ID NO: 359650 - DNA, 25 bp, Artificial
  Probe
gccagcacgcgcacgccggaaggtt

SEQ ID NO: 359651 - DNA, 25 bp, Artificial
  Probe
cctcgcgagctgtcgccaacggtgg

SEQ ID NO: 359652 - DNA, 25 bp, Artificial
  Probe
agttactacaaacttcagcctgaag

SEQ ID NO: 359653 - DNA, 25 bp, Artificial
  Probe
aagccagcgaacattttgatcagtg

SEQ ID NO: 359654 - DNA, 25 bp, Artificial
  Probe
tgtcacgccggctggcctggtgctt

SEQ ID NO: 359655 - DNA, 25 bp, Artificial
  Probe
ggtttggctcggtgtacaaagccac

SEQ ID NO: 359656 - DNA, 25 bp, Artificial
  Probe
tttccgaggggcactgggctgactc

SEQ ID NO: 359657 - DNA, 25 bp, Artificial
  Probe
gttaacggcctgctttttctccact

SEQ ID NO: 359658 - DNA, 25 bp, Artificial
  Probe
tacaccaagtcatctacggtgccac

SEQ ID NO: 359659 - DNA, 25 bp, Artificial
  Probe
agcttcaggatctgcggtgccggcc

SEQ ID NO: 359660 - DNA, 25 bp, Artificial
  Probe
ccataatcatggagtttgggggcaa

SEQ ID NO: 359661 - DNA, 25 bp, Artificial
  Probe
gctcctgaaaggagagatcgccacg

SEQ ID NO: 359662 - DNA, 25 bp, Artificial
  Probe
acaaggtctccttgtccttgcaaag

SEQ ID NO: 359663 - DNA, 25 bp, Artificial
  Probe
ggtctcttgtctttactgtataaaa

SEQ ID NO: 359664 - DNA, 25 bp, Artificial
  Probe
cttttgagacagtattgtgtagtcc

SEQ ID NO: 359665 - DNA, 25 bp, Artificial
  Probe
attgtggcctgtattttgcttatgc

SEQ ID NO: 359666 - DNA, 25 bp, Artificial
  Probe
ccaagttgcctctgaacttgctacc

SEQ ID NO: 359667 - DNA, 25 bp, Artificial
  Probe
gaaccgctacaccagctcttggtct

SEQ ID NO: 359668 - DNA, 25 bp, Artificial
  Probe
gaacttgctaccaagggtggccttg

SEQ ID NO: 359669 - DNA, 25 bp, Artificial
  Probe
acagtattgtgtagtccaagttgcc

SEQ ID NO: 359670 - DNA, 25 bp, Artificial
  Probe
ggtacagtcatgaaccgctacacca

SEQ ID NO: 359671 - DNA, 25 bp, Artificial
  Probe
attgtgtagtccaagttgcctctga

SEQ ID NO: 359672 - DNA, 25 bp, Artificial
  Probe
tgctagggtacagtcatgaaccgct

SEQ ID NO: 359673 - DNA, 25 bp, Artificial
  Probe
ccaccctaccaagtgctagggtaca

SEQ ID NO: 359674 - DNA, 25 bp, Artificial
  Probe
tgccatctgctgaggctcaactgtc

SEQ ID NO: 359675 - DNA, 25 bp, Artificial
  Probe
aagttgcctctgaacttgctaccaa

SEQ ID NO: 359676 - DNA, 25 bp, Artificial
  Probe
ggcctgtattttgcttatgcatttg

SEQ ID NO: 359677 - DNA, 25 bp, Artificial
  Probe
caagtgctagggtacagtcatgaac

SEQ ID NO: 359678 - DNA, 25 bp, Artificial
  Probe
tctgctgaggctcaactgtcttcca

SEQ ID NO: 359679 - DNA, 25 bp, Artificial
  Probe
agtgctagggtacagtcatgaaccg

SEQ ID NO: 359680 - DNA, 25 bp, Artificial
  Probe
agctcttggtctcttgtctttactg

SEQ ID NO: 359681 - DNA, 25 bp, Artificial
  Probe
gtggcctgtattttgcttatgcatt

SEQ ID NO: 359682 - DNA, 25 bp, Artificial
  Probe
tccaacatgggtttatgacactaca

SEQ ID NO: 359683 - DNA, 25 bp, Artificial
  Probe
ggtggccttgaactccttaattctt

SEQ ID NO: 359684 - DNA, 25 bp, Artificial
  Probe
ctaccaagtgctagggtacagtcat

SEQ ID NO: 359685 - DNA, 25 bp, Artificial
  Probe
gtacagtcatgaaccgctacaccag

SEQ ID NO: 359686 - DNA, 25 bp, Artificial
  Probe
cccatgttcctgtttaggaagggct

SEQ ID NO: 359687 - DNA, 25 bp, Artificial
  Probe
ccttttgagacagtattgtgtagtc

SEQ ID NO: 359688 - DNA, 25 bp, Artificial
  Probe
ctgtcttccaacatgggtttatgac

SEQ ID NO: 359689 - DNA, 25 bp, Artificial
  Probe
tggtctcttgtctttactgtataaa

SEQ ID NO: 359690 - DNA, 25 bp, Artificial
  Probe
acatagggacagactttctgggcag

SEQ ID NO: 359691 - DNA, 25 bp, Artificial
  Probe
ctcaactgtcttccaacatgggttt

SEQ ID NO: 359692 - DNA, 25 bp, Artificial
  Probe
accctaccaagtgctagggtacagt

SEQ ID NO: 359693 - DNA, 25 bp, Artificial
  Probe
agcccatgttcctgtttaggaaggg

SEQ ID NO: 359694 - DNA, 25 bp, Artificial
  Probe
aagacctaagaacatagggacagac

SEQ ID NO: 359695 - DNA, 25 bp, Artificial
  Probe
gaaataaacaaggtctccttgtcct

SEQ ID NO: 359696 - DNA, 25 bp, Artificial
  Probe
cttgcaaagcccatgttcctgttta

SEQ ID NO: 359697 - DNA, 25 bp, Artificial
  Probe
ggacagactttctgggcagtaagac

SEQ ID NO: 359698 - DNA, 25 bp, Artificial
  Probe
gtccaagttgcctctgaacttgcta

SEQ ID NO: 359699 - DNA, 25 bp, Artificial
  Probe
aactgtcttccaacatgggtttatg

SEQ ID NO: 359700 - DNA, 25 bp, Artificial
  Probe
ttgtccttgcaaagcccatgttcct

SEQ ID NO: 359701 - DNA, 25 bp, Artificial
  Probe
ctgaggctcaactgtcttccaacat

SEQ ID NO: 359702 - DNA, 25 bp, Artificial
  Probe
gtggccttgaactccttaattcttt

SEQ ID NO: 359703 - DNA, 25 bp, Artificial
  Probe
gtcatgaaccgctacaccagctctt

SEQ ID NO: 359704 - DNA, 25 bp, Artificial
  Probe
ttccaacatgggtttatgacactac

SEQ ID NO: 359705 - DNA, 25 bp, Artificial
  Probe
cgctacaccagctcttggtctcttg

SEQ ID NO: 359706 - DNA, 25 bp, Artificial
  Probe
ggtgtagcaccttcatttaccctac

SEQ ID NO: 359707 - DNA, 25 bp, Artificial
  Probe
ggggtgtagcaccttcatttaccct

SEQ ID NO: 359708 - DNA, 25 bp, Artificial
  Probe
ggattgcaattattccccatgaacg

SEQ ID NO: 359709 - DNA, 25 bp, Artificial
  Probe
atgtccggggctgcacgcgcgctac

SEQ ID NO: 359710 - DNA, 25 bp, Artificial
  Probe
gccaccgagattgagcaataacagg

SEQ ID NO: 359711 - DNA, 25 bp, Artificial
  Probe
tcttagagggacaagtggcgttcag

SEQ ID NO: 359712 - DNA, 25 bp, Artificial
  Probe
actggctcagcgtgtgcctacccta

SEQ ID NO: 359713 - DNA, 25 bp, Artificial
  Probe
tgtctggttaattccgataacgaac

SEQ ID NO: 359714 - DNA, 25 bp, Artificial
  Probe
aggcctgagaagacggtcgaacttg

SEQ ID NO: 359715 - DNA, 25 bp, Artificial
  Probe
cgaacttgactatctagaggaagta

SEQ ID NO: 359716 - DNA, 25 bp, Artificial
  Probe
aaccccattcgtgatggggatcggg

SEQ ID NO: 359717 - DNA, 25 bp, Artificial
  Probe
tgcatggccgttcttagttggtgga

SEQ ID NO: 359718 - DNA, 25 bp, Artificial
  Probe
tgtccggggctgcacgcgcgctaca

SEQ ID NO: 359719 - DNA, 25 bp, Artificial
  Probe
tgagcaataacaggtctgtgatgcc

SEQ ID NO: 359720 - DNA, 25 bp, Artificial
  Probe
ttagtgaggccctcggatcggcccc

SEQ ID NO: 359721 - DNA, 25 bp, Artificial
  Probe
agtaagtgcgggtcataagcttgcg

SEQ ID NO: 359722 - DNA, 25 bp, Artificial
  Probe
tagctctttctcgattccgtgggtg

SEQ ID NO: 359723 - DNA, 25 bp, Artificial
  Probe
acaggtctgtgatgcccttagatgt

SEQ ID NO: 359724 - DNA, 25 bp, Artificial
  Probe
agcttgcgttgattaagtccctgcc

SEQ ID NO: 359725 - DNA, 25 bp, Artificial
  Probe
ctactaccgattggatggtttagtg

SEQ ID NO: 359726 - DNA, 25 bp, Artificial
  Probe
tgagaagacggtcgaacttgactat

SEQ ID NO: 359727 - DNA, 25 bp, Artificial
  Probe
ctgcacgcgcgctacactgaactgg

SEQ ID NO: 359728 - DNA, 25 bp, Artificial
  Probe
tggttaattccgataacgaacgaga

SEQ ID NO: 359729 - DNA, 25 bp, Artificial
  Probe
tggagcgatttgtctggttaattcc

SEQ ID NO: 359730 - DNA, 25 bp, Artificial
  Probe
gattgcaattattccccatgaacga

SEQ ID NO: 359731 - DNA, 25 bp, Artificial
  Probe
tccgtaggtgaacctgcggaaggat

SEQ ID NO: 359732 - DNA, 25 bp, Artificial
  Probe
tgcccttagatgtccggggctgcac

SEQ ID NO: 359733 - DNA, 25 bp, Artificial
  Probe
ccgttcttagttggtggagcgattt

SEQ ID NO: 359734 - DNA, 25 bp, Artificial
  Probe
tggctcagcgtgtgcctaccctacg

SEQ ID NO: 359735 - DNA, 25 bp, Artificial
  Probe
cgggtcataagcttgcgttgattaa

SEQ ID NO: 359736 - DNA, 25 bp, Artificial
  Probe
acagattgatagctctttctcgatt

SEQ ID NO: 359737 - DNA, 25 bp, Artificial
  Probe
accgattggatggtttagtgaggcc

SEQ ID NO: 359738 - DNA, 25 bp, Artificial
  Probe
caattattccccatgaacgaggaat

SEQ ID NO: 359739 - DNA, 25 bp, Artificial
  Probe
cataagcttgcgttgattaagtccc

SEQ ID NO: 359740 - DNA, 25 bp, Artificial
  Probe
cgcccgtcgctactaccgattggat

SEQ ID NO: 359741 - DNA, 25 bp, Artificial
  Probe
catggccgttcttagttggtggagc

SEQ ID NO: 359742 - DNA, 25 bp, Artificial
  Probe
gcatgctaactagttacgcgacccc

SEQ ID NO: 359743 - DNA, 25 bp, Artificial
  Probe
cgattggatggtttagtgaggccct

SEQ ID NO: 359744 - DNA, 25 bp, Artificial
  Probe
ccccaacttcttagagggacaagtg

SEQ ID NO: 359745 - DNA, 25 bp, Artificial
  Probe
cgaacgagactctcggcatgctaac

SEQ ID NO: 359746 - DNA, 25 bp, Artificial
  Probe
attcccagtaagtgcgggtcataag

SEQ ID NO: 359747 - DNA, 25 bp, Artificial
  Probe
caaggtttccgtaggtgaacctgcg

SEQ ID NO: 359748 - DNA, 25 bp, Artificial
  Probe
tctgtgatgcccttagatgtccggg

SEQ ID NO: 359749 - DNA, 25 bp, Artificial
  Probe
gagactctcggcatgctaactagtt

SEQ ID NO: 359750 - DNA, 25 bp, Artificial
  Probe
acacggacaggattgacagattgat

SEQ ID NO: 359751 - DNA, 25 bp, Artificial
  Probe
tggcgttcagccaccgagattgagc

SEQ ID NO: 359752 - DNA, 25 bp, Artificial
  Probe
ccgttgaaccccattcgtgatgggg

SEQ ID NO: 359753 - DNA, 25 bp, Artificial
  Probe
ggacaagtggcgttcagccaccgag

SEQ ID NO: 359754 - DNA, 25 bp, Artificial
  Probe
gatgttcctggtcaaagtttttaca

SEQ ID NO: 359755 - DNA, 25 bp, Artificial
  Probe
cagtgtcaaaacttaactgtgtccg

SEQ ID NO: 359756 - DNA, 25 bp, Artificial
  Probe
ctcctttgaatgctacctaagcatg

SEQ ID NO: 359757 - DNA, 25 bp, Artificial
  Probe
agttactgtgaactcttgtctcttg

SEQ ID NO: 359758 - DNA, 25 bp, Artificial
  Probe
agctttgcagttactgtgaactctt

SEQ ID NO: 359759 - DNA, 25 bp, Artificial
  Probe
cattgcccactgatagaggtacaat

SEQ ID NO: 359760 - DNA, 25 bp, Artificial
  Probe
cctttgaatgctacctaagcatgac

SEQ ID NO: 359761 - DNA, 25 bp, Artificial
  Probe
cagatgctgatgttcctggtcaaag

SEQ ID NO: 359762 - DNA, 25 bp, Artificial
  Probe
tttgcagttactgtgaactcttgtc

SEQ ID NO: 359763 - DNA, 25 bp, Artificial
  Probe
ccaacagtgtcaaaacttaactgtg

SEQ ID NO: 359764 - DNA, 25 bp, Artificial
  Probe
tcctttgaatgctacctaagcatga

SEQ ID NO: 359765 - DNA, 25 bp, Artificial
  Probe
aatgctacctaagcatgaccggtat

SEQ ID NO: 359766 - DNA, 25 bp, Artificial
  Probe
ctttgcagttactgtgaactcttgt

SEQ ID NO: 359767 - DNA, 25 bp, Artificial
  Probe
atgctacctaagcatgaccggtatt

SEQ ID NO: 359768 - DNA, 25 bp, Artificial
  Probe
gctttgcagttactgtgaactcttg

SEQ ID NO: 359769 - DNA, 25 bp, Artificial
  Probe
cccactgatagaggtacaattttcc

SEQ ID NO: 359770 - DNA, 25 bp, Artificial
  Probe
gtccgataccaaaatgcttcagtat

SEQ ID NO: 359771 - DNA, 25 bp, Artificial
  Probe
aagtcagatgctgatgttcctggtc

SEQ ID NO: 359772 - DNA, 25 bp, Artificial
  Probe
tgttcctggtcaaagtttttacagt

SEQ ID NO: 359773 - DNA, 25 bp, Artificial
  Probe
acagtgtcaaaacttaactgtgtcc

SEQ ID NO: 359774 - DNA, 25 bp, Artificial
  Probe
gatgctgatgttcctggtcaaagtt

SEQ ID NO: 359775 - DNA, 25 bp, Artificial
  Probe
taactgtgtccgataccaaaatgct

SEQ ID NO: 359776 - DNA, 25 bp, Artificial
  Probe
tacctaagcatgaccggtattttta

SEQ ID NO: 359777 - DNA, 25 bp, Artificial
  Probe
gtgtccgataccaaaatgcttcagt

SEQ ID NO: 359778 - DNA, 25 bp, Artificial
  Probe
tgtcaaaacttaactgtgtccgata

SEQ ID NO: 359779 - DNA, 25 bp, Artificial
  Probe
ttactgtgaactcttgtctcttgga

SEQ ID NO: 359780 - DNA, 25 bp, Artificial
  Probe
gcccactgatagaggtacaattttc

SEQ ID NO: 359781 - DNA, 25 bp, Artificial
  Probe
tgtgaactcttgtctcttggaggaa

SEQ ID NO: 359782 - DNA, 25 bp, Artificial
  Probe
agaataagtgcattgcccactgata

SEQ ID NO: 359783 - DNA, 25 bp, Artificial
  Probe
gcattgcccactgatagaggtacaa

SEQ ID NO: 359784 - DNA, 25 bp, Artificial
  Probe
gagcttgtcttagagggcttttctt

SEQ ID NO: 359785 - DNA, 25 bp, Artificial
  Probe
aactcttgtctcttggaggaaactt

SEQ ID NO: 359786 - DNA, 25 bp, Artificial
  Probe
agatgctgatgttcctggtcaaagt

SEQ ID NO: 359787 - DNA, 25 bp, Artificial
  Probe
ttttaaagtcagatgctgatgttcc

SEQ ID NO: 359788 - DNA, 25 bp, Artificial
  Probe
gtcaaaacttaactgtgtccgatac

SEQ ID NO: 359789 - DNA, 25 bp, Artificial
  Probe
ggtacaattttccagacttccagaa

SEQ ID NO: 359790 - DNA, 25 bp, Artificial
  Probe
tgcattgcccactgatagaggtaca

SEQ ID NO: 359791 - DNA, 25 bp, Artificial
  Probe
gataccaaaatgcttcagtatttgt

SEQ ID NO: 359792 - DNA, 25 bp, Artificial
  Probe
actcttgtctcttggaggaaacttt

SEQ ID NO: 359793 - DNA, 25 bp, Artificial
  Probe
gaataagtgcattgcccactgatag

SEQ ID NO: 359794 - DNA, 25 bp, Artificial
  Probe
actgtgtccgataccaaaatgcttc

SEQ ID NO: 359795 - DNA, 25 bp, Artificial
  Probe
agtgcattgcccactgatagaggta

SEQ ID NO: 359796 - DNA, 25 bp, Artificial
  Probe
taagctttgcagttactgtgaactc

SEQ ID NO: 359797 - DNA, 25 bp, Artificial
  Probe
aggtacaattttccagacttccaga

SEQ ID NO: 359798 - DNA, 25 bp, Artificial
  Probe
cgataccaaaatgcttcagtatttg

SEQ ID NO: 359799 - DNA, 25 bp, Artificial
  Probe
gaactcttgtctcttggaggaaact

SEQ ID NO: 359800 - DNA, 25 bp, Artificial
  Probe
aatggaaatctgaccccaagagtag

SEQ ID NO: 359801 - DNA, 25 bp, Artificial
  Probe
tccaatcagatgtaatctggtcagt

SEQ ID NO: 359802 - DNA, 25 bp, Artificial
  Probe
tccagcatcacctgaacttcagaag

SEQ ID NO: 359803 - DNA, 25 bp, Artificial
  Probe
gaccctaactgtctttgctgtttat

SEQ ID NO: 359804 - DNA, 25 bp, Artificial
  Probe
ggaagggaaccagaccttggctgca

SEQ ID NO: 359805 - DNA, 25 bp, Artificial
  Probe
tggtcctccagcatcacctgaactt

SEQ ID NO: 359806 - DNA, 25 bp, Artificial
  Probe
gctatggccaacagggtgcgcccac

SEQ ID NO: 359807 - DNA, 25 bp, Artificial
  Probe
ggtcagtgaagtccatgaagatccc

SEQ ID NO: 359808 - DNA, 25 bp, Artificial
  Probe
acttctccatgcactagaggcccag

SEQ ID NO: 359809 - DNA, 25 bp, Artificial
  Probe
cactagaggcccagtcctgaatggg

SEQ ID NO: 359810 - DNA, 25 bp, Artificial
  Probe
ggagaccctaactgtctttgctgtt

SEQ ID NO: 359811 - DNA, 25 bp, Artificial
  Probe
tccatgcactagaggcccagtcctg

SEQ ID NO: 359812 - DNA, 25 bp, Artificial
  Probe
cctgtcccttgaggtaaggggctct

SEQ ID NO: 359813 - DNA, 25 bp, Artificial
  Probe
ttggtcctccagcatcacctgaact

SEQ ID NO: 359814 - DNA, 25 bp, Artificial
  Probe
gataacctctgtagagagaggacta

SEQ ID NO: 359815 - DNA, 25 bp, Artificial
  Probe
gctctcgaatggaaatctgacccca

SEQ ID NO: 359816 - DNA, 25 bp, Artificial
  Probe
aatctggtcagtgaagtccatgaag

SEQ ID NO: 359817 - DNA, 25 bp, Artificial
  Probe
gaccccaagagtagagcagtagact

SEQ ID NO: 359818 - DNA, 25 bp, Artificial
  Probe
ccaatcagatgtaatctggtcagtg

SEQ ID NO: 359819 - DNA, 25 bp, Artificial
  Probe
aagtccatgaagatcccacgggtgg

SEQ ID NO: 359820 - DNA, 25 bp, Artificial
  Probe
cagatgtaatctggtcagtgaagtc

SEQ ID NO: 359821 - DNA, 25 bp, Artificial
  Probe
atcacctgaacttcagaagctctcg

SEQ ID NO: 359822 - DNA, 25 bp, Artificial
  Probe
ctggtcagtgaagtccatgaagatc

SEQ ID NO: 359823 - DNA, 25 bp, Artificial
  Probe
tctccaatcagatgtaatctggtca

SEQ ID NO: 359824 - DNA, 25 bp, Artificial
  Probe
ttctccatgcactagaggcccagtc

SEQ ID NO: 359825 - DNA, 25 bp, Artificial
  Probe
ggtgtgactttctctccttcctcct

SEQ ID NO: 359826 - DNA, 25 bp, Artificial
  Probe
gtcccttgaggtaaggggctctaga

SEQ ID NO: 359827 - DNA, 25 bp, Artificial
  Probe
tcccttgaggtaaggggctctagaa

SEQ ID NO: 359828 - DNA, 25 bp, Artificial
  Probe
aagctctcgaatggaaatctgaccc

SEQ ID NO: 359829 - DNA, 25 bp, Artificial
  Probe
accccaagagtagagcagtagactg

SEQ ID NO: 359830 - DNA, 25 bp, Artificial
  Probe
tgaagtccatgaagatcccacgggt

SEQ ID NO: 359831 - DNA, 25 bp, Artificial
  Probe
gcatcacctgaacttcagaagctct

SEQ ID NO: 359832 - DNA, 25 bp, Artificial
  Probe
tgaaacgggcagagaggagataacc

SEQ ID NO: 359833 - DNA, 25 bp, Artificial
  Probe
ggttggtgtgactttctctccttcc

SEQ ID NO: 359834 - DNA, 25 bp, Artificial
  Probe
taactctggccttggtcctccagca

SEQ ID NO: 359835 - DNA, 25 bp, Artificial
  Probe
gaatggaaatctgaccccaagagta

SEQ ID NO: 359836 - DNA, 25 bp, Artificial
  Probe
caggagaccctaactgtctttgctg

SEQ ID NO: 359837 - DNA, 25 bp, Artificial
  Probe
aaatctgaccccaagagtagagcag

SEQ ID NO: 359838 - DNA, 25 bp, Artificial
  Probe
cacctgaacttcagaagctctcgaa

SEQ ID NO: 359839 - DNA, 25 bp, Artificial
  Probe
gtcagtgaagtccatgaagatccca

SEQ ID NO: 359840 - DNA, 25 bp, Artificial
  Probe
aactctggccttggtcctccagcat

SEQ ID NO: 359841 - DNA, 25 bp, Artificial
  Probe
ccttctccaatcagatgtaatctgg

SEQ ID NO: 359842 - DNA, 25 bp, Artificial
  Probe
gagataacctctgtagagagaggac

SEQ ID NO: 359843 - DNA, 25 bp, Artificial
  Probe
tcaacccaggagaccctaactgtct

SEQ ID NO: 359844 - DNA, 25 bp, Artificial
  Probe
ggaaccagaccttggctgcatggag

SEQ ID NO: 359845 - DNA, 25 bp, Artificial
  Probe
ctagaggcccagtcctgaatgggct

SEQ ID NO: 359846 - DNA, 25 bp, Artificial
  Probe
tgtgctgagccctggtttttcccca

SEQ ID NO: 359847 - DNA, 25 bp, Artificial
  Probe
tgccgctaggtgttcccagtgctcc

SEQ ID NO: 359848 - DNA, 25 bp, Artificial
  Probe
tggcatgcacggaggattctctccc

SEQ ID NO: 359849 - DNA, 25 bp, Artificial
  Probe
gaccacgttgggagaaatagtctca

SEQ ID NO: 359850 - DNA, 25 bp, Artificial
  Probe
cgccaagttggctgtaactcccatc

SEQ ID NO: 359851 - DNA, 25 bp, Artificial
  Probe
agatttgttccagaacccttcactg

SEQ ID NO: 359852 - DNA, 25 bp, Artificial
  Probe
gcctctagtccgaattttaggtctc

SEQ ID NO: 359853 - DNA, 25 bp, Artificial
  Probe
gatttgttccagaacccttcactgc

SEQ ID NO: 359854 - DNA, 25 bp, Artificial
  Probe
tgtggggttctagactctatcttgg

SEQ ID NO: 359855 - DNA, 25 bp, Artificial
  Probe
ggctgggctccgtgttccaggccac

SEQ ID NO: 359856 - DNA, 25 bp, Artificial
  Probe
agtgggttctagacgctgttcccca

SEQ ID NO: 359857 - DNA, 25 bp, Artificial
  Probe
gttctagatttgttccagaaccctt

SEQ ID NO: 359858 - DNA, 25 bp, Artificial
  Probe
agccttggtcggaatcacacacaca

SEQ ID NO: 359859 - DNA, 25 bp, Artificial
  Probe
ttcgttgtgctgagccctggttttt

SEQ ID NO: 359860 - DNA, 25 bp, Artificial
  Probe
tctagtccgaattttaggtctctta

SEQ ID NO: 359861 - DNA, 25 bp, Artificial
  Probe
gccccaagtgggttctagacgctgt

SEQ ID NO: 359862 - DNA, 25 bp, Artificial
  Probe
gattccagatcagctctctgcatcc

SEQ ID NO: 359863 - DNA, 25 bp, Artificial
  Probe
atctgctgccgctaggtgttcccag

SEQ ID NO: 359864 - DNA, 25 bp, Artificial
  Probe
ggattcctggcatgcacggaggatt

SEQ ID NO: 359865 - DNA, 25 bp, Artificial
  Probe
gcctttctgtgttctagattcgttg

SEQ ID NO: 359866 - DNA, 25 bp, Artificial
  Probe
ccttccatgttctggggattcctgg

SEQ ID NO: 359867 - DNA, 25 bp, Artificial
  Probe
tgctggcattttaaacttcaaacag

SEQ ID NO: 359868 - DNA, 25 bp, Artificial
  Probe
agatcagctctctgcatccttcaag

SEQ ID NO: 359869 - DNA, 25 bp, Artificial
  Probe
tcaaacagtctctagagcctttctg

SEQ ID NO: 359870 - DNA, 25 bp, Artificial
  Probe
acctcccttccatgttctggggatt

SEQ ID NO: 359871 - DNA, 25 bp, Artificial
  Probe
tccacttcagttgtagaattaagtg

SEQ ID NO: 359872 - DNA, 25 bp, Artificial
  Probe
tggatgctgttccaactcttcccag

SEQ ID NO: 359873 - DNA, 25 bp, Artificial
  Probe
tctggggattcctggcatgcacgga

SEQ ID NO: 359874 - DNA, 25 bp, Artificial
  Probe
tctagacgctgttccccagcattgc

SEQ ID NO: 359875 - DNA, 25 bp, Artificial
  Probe
actctatcttggtagttttatgcct

SEQ ID NO: 359876 - DNA, 25 bp, Artificial
  Probe
cccgacttttctcagtcagcttttg

SEQ ID NO: 359877 - DNA, 25 bp, Artificial
  Probe
aatctcatctgctgccgctaggtgt

SEQ ID NO: 359878 - DNA, 25 bp, Artificial
  Probe
atcagctctctgcatccttcaaggc

SEQ ID NO: 359879 - DNA, 25 bp, Artificial
  Probe
tttctcagtcagcttttgttctaga

SEQ ID NO: 359880 - DNA, 25 bp, Artificial
  Probe
aagttggctgtaactcccatccacc

SEQ ID NO: 359881 - DNA, 25 bp, Artificial
  Probe
gctgttccccagcattgctggcatt

SEQ ID NO: 359882 - DNA, 25 bp, Artificial
  Probe
aacagtctctagagcctttctgtgt

SEQ ID NO: 359883 - DNA, 25 bp, Artificial
  Probe
gtctcatgagattgcctgctccaga

SEQ ID NO: 359884 - DNA, 25 bp, Artificial
  Probe
ctctctccctagaccacgttgggag

SEQ ID NO: 359885 - DNA, 25 bp, Artificial
  Probe
gaaatagtctcatgagattgcctgc

SEQ ID NO: 359886 - DNA, 25 bp, Artificial
  Probe
gtgctgagccctggtttttccccac

SEQ ID NO: 359887 - DNA, 25 bp, Artificial
  Probe
ccgtgcatggctccagccttggtcg

SEQ ID NO: 359888 - DNA, 25 bp, Artificial
  Probe
tctgtgttctagattcgttgtgctg

SEQ ID NO: 359889 - DNA, 25 bp, Artificial
  Probe
ccccaacatctggatgctgttccaa

SEQ ID NO: 359890 - DNA, 25 bp, Artificial
  Probe
cctccacttcagttgtagaattaag

SEQ ID NO: 359891 - DNA, 25 bp, Artificial
  Probe
catgttctggggattcctggcatgc

SEQ ID NO: 359892 - DNA, 25 bp, Artificial
  Probe
tgaaaacgagtctcaatcaaagtct

SEQ ID NO: 359893 - DNA, 25 bp, Artificial
  Probe
gattaaatcagcaacccctgcagtt

SEQ ID NO: 359894 - DNA, 25 bp, Artificial
  Probe
cctaatacacagagatgtggtgata

SEQ ID NO: 359895 - DNA, 25 bp, Artificial
  Probe
ttccagaggatgtgggttccatcac

SEQ ID NO: 359896 - DNA, 25 bp, Artificial
  Probe
gcagataagacttgcctgtggtagc

SEQ ID NO: 359897 - DNA, 25 bp, Artificial
  Probe
tgtgtggtagcctttccattccttt

SEQ ID NO: 359898 - DNA, 25 bp, Artificial
  Probe
cgagtctcaatcaaagtctgttctc

SEQ ID NO: 359899 - DNA, 25 bp, Artificial
  Probe
ataagacttgcctgtggtagccatg

SEQ ID NO: 359900 - DNA, 25 bp, Artificial
  Probe
agccatgtgtggtagcctttccatt

SEQ ID NO: 359901 - DNA, 25 bp, Artificial
  Probe
cttgcctgtggtagccatgtgtggt

SEQ ID NO: 359902 - DNA, 25 bp, Artificial
  Probe
ctataacagggatggctcaagttga

SEQ ID NO: 359903 - DNA, 25 bp, Artificial
  Probe
agctattacttgtccagagagatgt

SEQ ID NO: 359904 - DNA, 25 bp, Artificial
  Probe
cctgtggtagccatgtgtggtagcc

SEQ ID NO: 359905 - DNA, 25 bp, Artificial
  Probe
caaaggagcatcttgagtgcagata

SEQ ID NO: 359906 - DNA, 25 bp, Artificial
  Probe
aaacgagtctcaatcaaagtctgtt

SEQ ID NO: 359907 - DNA, 25 bp, Artificial
  Probe
ggtagccatgtgtggtagcctttcc

SEQ ID NO: 359908 - DNA, 25 bp, Artificial
  Probe
caaagtctgttctctatttcaaagg

SEQ ID NO: 359909 - DNA, 25 bp, Artificial
  Probe
actataacagggatggctcaagttg

SEQ ID NO: 359910 - DNA, 25 bp, Artificial
  Probe
tagattaaatcagcaacccctgcag

SEQ ID NO: 359911 - DNA, 25 bp, Artificial
  Probe
gaattcatagcatggccctttactc

SEQ ID NO: 359912 - DNA, 25 bp, Artificial
  Probe
gccatgtgtggtagcctttccattc

SEQ ID NO: 359913 - DNA, 25 bp, Artificial
  Probe
gtctgttctctatttcaaaggagca

SEQ ID NO: 359914 - DNA, 25 bp, Artificial
  Probe
cttccagaggatgtgggttccatca

SEQ ID NO: 359915 - DNA, 25 bp, Artificial
  Probe
gaagttacttagcttcataaactag

SEQ ID NO: 359916 - DNA, 25 bp, Artificial
  Probe
acagggatggctcaagttgataagc

SEQ ID NO: 359917 - DNA, 25 bp, Artificial
  Probe
tgcagataagacttgcctgtggtag

SEQ ID NO: 359918 - DNA, 25 bp, Artificial
  Probe
tgataagctattacttgtccagaga

SEQ ID NO: 359919 - DNA, 25 bp, Artificial
  Probe
ggagcatcttgagtgcagataagac

SEQ ID NO: 359920 - DNA, 25 bp, Artificial
  Probe
ccttttgtaagtcaatgtattgttc

SEQ ID NO: 359921 - DNA, 25 bp, Artificial
  Probe
tttatacctaatacacagagatgtg

SEQ ID NO: 359922 - DNA, 25 bp, Artificial
  Probe
gagtctcaatcaaagtctgttctct

SEQ ID NO: 359923 - DNA, 25 bp, Artificial
  Probe
accgactataacagggatggctcaa

SEQ ID NO: 359924 - DNA, 25 bp, Artificial
  Probe
taactgggagagaggccactatata

SEQ ID NO: 359925 - DNA, 25 bp, Artificial
  Probe
atttcaaaggagcatcttgagtgca

SEQ ID NO: 359926 - DNA, 25 bp, Artificial
  Probe
agttgataagctattacttgtccag

SEQ ID NO: 359927 - DNA, 25 bp, Artificial
  Probe
ggtagcctttccattcctttctgat

SEQ ID NO: 359928 - DNA, 25 bp, Artificial
  Probe
aatatttaccgactataacagggat

SEQ ID NO: 359929 - DNA, 25 bp, Artificial
  Probe
gcaaccgaaggcagagagaaaaacg

SEQ ID NO: 359930 - DNA, 25 bp, Artificial
  Probe
acttgtccagagagatgtctcagtg

SEQ ID NO: 359931 - DNA, 25 bp, Artificial
  Probe
ttatacctaatacacagagatgtgg

SEQ ID NO: 359932 - DNA, 25 bp, Artificial
  Probe
aacgagtctcaatcaaagtctgttc

SEQ ID NO: 359933 - DNA, 25 bp, Artificial
  Probe
gtgcagataagacttgcctgtggta

SEQ ID NO: 359934 - DNA, 25 bp, Artificial
  Probe
tatacctaatacacagagatgtggt

SEQ ID NO: 359935 - DNA, 25 bp, Artificial
  Probe
catcttgagtgcagataagacttgc

SEQ ID NO: 359936 - DNA, 25 bp, Artificial
  Probe
atacctaatacacagagatgtggtg

SEQ ID NO: 359937 - DNA, 25 bp, Artificial
  Probe
gatgtgggttccatcacctatacag

SEQ ID NO: 359938 - DNA, 25 bp, Artificial
  Probe
gtagtcatcctaactgcactttgga

SEQ ID NO: 359939 - DNA, 25 bp, Artificial
  Probe
cttggcctagatttcccttcaggcc

SEQ ID NO: 359940 - DNA, 25 bp, Artificial
  Probe
gacagcttggcttggcttagctcct

SEQ ID NO: 359941 - DNA, 25 bp, Artificial
  Probe
ggatagatacagctcccatacaccc

SEQ ID NO: 359942 - DNA, 25 bp, Artificial
  Probe
gttccttggcctagatttcccttca

SEQ ID NO: 359943 - DNA, 25 bp, Artificial
  Probe
gccatcttgactgtagggtcaggag

SEQ ID NO: 359944 - DNA, 25 bp, Artificial
  Probe
ctcccctggagctaaaaatggtagt

SEQ ID NO: 359945 - DNA, 25 bp, Artificial
  Probe
caaaggacagcttggcttggcttag

SEQ ID NO: 359946 - DNA, 25 bp, Artificial
  Probe
gacaagccatcttgactgtagggtc

SEQ ID NO: 359947 - DNA, 25 bp, Artificial
  Probe
cgtccttggatagatacagctccca

SEQ ID NO: 359948 - DNA, 25 bp, Artificial
  Probe
ttcctcccgtccttggatagataca

SEQ ID NO: 359949 - DNA, 25 bp, Artificial
  Probe
tgcaaaggacagcttggcttggctt

SEQ ID NO: 359950 - DNA, 25 bp, Artificial
  Probe
cacacacaggagagccctgccaagt

SEQ ID NO: 359951 - DNA, 25 bp, Artificial
  Probe
tccccaaatacctgggtcctgggtg

SEQ ID NO: 359952 - DNA, 25 bp, Artificial
  Probe
acttgctatgaaaggccgtgtggga

SEQ ID NO: 359953 - DNA, 25 bp, Artificial
  Probe
aaatggtagtcatcctaactgcact

SEQ ID NO: 359954 - DNA, 25 bp, Artificial
  Probe
aacttgctatgaaaggccgtgtggg

SEQ ID NO: 359955 - DNA, 25 bp, Artificial
  Probe
aatacctgggtcctgggtgcaaagg

SEQ ID NO: 359956 - DNA, 25 bp, Artificial
  Probe
ctgggacccaagttcttagtctctg

SEQ ID NO: 359957 - DNA, 25 bp, Artificial
  Probe
acacacacaggagagccctgccaag

SEQ ID NO: 359958 - DNA, 25 bp, Artificial
  Probe
cgacaaatgaacttgctatgaaagg

SEQ ID NO: 359959 - DNA, 25 bp, Artificial
  Probe
caagttcttagtctctgggacccca

SEQ ID NO: 359960 - DNA, 25 bp, Artificial
  Probe
catcttgactgtagggtcaggagga

SEQ ID NO: 359961 - DNA, 25 bp, Artificial
  Probe
gagagccctgccaagttccttggcc

SEQ ID NO: 359962 - DNA, 25 bp, Artificial
  Probe
tgcactttggaaaccaagagagagg

SEQ ID NO: 359963 - DNA, 25 bp, Artificial
  Probe
gagggacaagccatcttgactgtag

SEQ ID NO: 359964 - DNA, 25 bp, Artificial
  Probe
caaatacctgggtcctgggtgcaaa

SEQ ID NO: 359965 - DNA, 25 bp, Artificial
  Probe
agatttcccttcaggccacaggtct

SEQ ID NO: 359966 - DNA, 25 bp, Artificial
  Probe
ttggacagggcgacaaatgaacttg

SEQ ID NO: 359967 - DNA, 25 bp, Artificial
  Probe
tgccaagttccttggcctagatttc

SEQ ID NO: 359968 - DNA, 25 bp, Artificial
  Probe
tcctaactgcactttggaaaccaag

SEQ ID NO: 359969 - DNA, 25 bp, Artificial
  Probe
cagcccttggacagggcgacaaatg

SEQ ID NO: 359970 - DNA, 25 bp, Artificial
  Probe
gtctaaagcctcaggcggccagagg

SEQ ID NO: 359971 - DNA, 25 bp, Artificial
  Probe
atacctgggtcctgggtgcaaagga

SEQ ID NO: 359972 - DNA, 25 bp, Artificial
  Probe
gtcatcctaactgcactttggaaac

SEQ ID NO: 359973 - DNA, 25 bp, Artificial
  Probe
ggacagcttggcttggcttagctcc

SEQ ID NO: 359974 - DNA, 25 bp, Artificial
  Probe
cctagatttcccttcaggccacagg

SEQ ID NO: 359975 - DNA, 25 bp, Artificial
  Probe
tggatagatacagctcccatacacc

SEQ ID NO: 359976 - DNA, 25 bp, Artificial
  Probe
ctccagcccttggacagggcgacaa

SEQ ID NO: 359977 - DNA, 25 bp, Artificial
  Probe
gacccaagttcttagtctctgggac

SEQ ID NO: 359978 - DNA, 25 bp, Artificial
  Probe
caaatgaacttgctatgaaaggccg

SEQ ID NO: 359979 - DNA, 25 bp, Artificial
  Probe
cccctggagctaaaaatggtagtca

SEQ ID NO: 359980 - DNA, 25 bp, Artificial
  Probe
aggctgggacccaagttcttagtct

SEQ ID NO: 359981 - DNA, 25 bp, Artificial
  Probe
tcctgggtgcaaaggacagcttggc

SEQ ID NO: 359982 - DNA, 25 bp, Artificial
  Probe
tacttccccaaatacctgggtcctg

SEQ ID NO: 359983 - DNA, 25 bp, Artificial
  Probe
tccttggcctagatttcccttcagg

SEQ ID NO: 359984 - DNA, 25 bp, Artificial
  Probe
tggctttcccgttactgtggtgatt

SEQ ID NO: 359985 - DNA, 25 bp, Artificial
  Probe
aagatccaactttggccgttaactg

SEQ ID NO: 359986 - DNA, 25 bp, Artificial
  Probe
gaagatccaactttggccgttaact

SEQ ID NO: 359987 - DNA, 25 bp, Artificial
  Probe
tttgtcctttgtcactgactcacgg

SEQ ID NO: 359988 - DNA, 25 bp, Artificial
  Probe
actgtggtgattgtgtaggaaaggg

SEQ ID NO: 359989 - DNA, 25 bp, Artificial
  Probe
ggctttcccgttactgtggtgattg

SEQ ID NO: 359990 - DNA, 25 bp, Artificial
  Probe
gtgaagatccaactttggccgttaa

SEQ ID NO: 359991 - DNA, 25 bp, Artificial
  Probe
ttaactggctttcccgttactgtgg

SEQ ID NO: 359992 - DNA, 25 bp, Artificial
  Probe
tccaactttggccgttaactggctt

SEQ ID NO: 359993 - DNA, 25 bp, Artificial
  Probe
attgattttgtcctttgtcactgac

SEQ ID NO: 359994 - DNA, 25 bp, Artificial
  Probe
ttaatagtgacttgtgaagatccaa

SEQ ID NO: 359995 - DNA, 25 bp, Artificial
  Probe
acttgtgaagatccaactttggccg

SEQ ID NO: 359996 - DNA, 25 bp, Artificial
  Probe
ctttcccgttactgtggtgattgtg

SEQ ID NO: 359997 - DNA, 25 bp, Artificial
  Probe
tgtgaagatccaactttggccgtta

SEQ ID NO: 359998 - DNA, 25 bp, Artificial
  Probe
acattgattttgtcctttgtcactg

SEQ ID NO: 359999 - DNA, 25 bp, Artificial
  Probe
ggtgtcacattgattttgtcctttg

SEQ ID NO: 360000 - DNA, 25 bp, Artificial
  Probe
tttttttccagagtttgtacaaatg

SEQ ID NO: 360001 - DNA, 25 bp, Artificial
  Probe
gtcacattgattttgtcctttgtca

SEQ ID NO: 360002 - DNA, 25 bp, Artificial
  Probe
aggaaagggcagtgtgggtgtcaca

SEQ ID NO: 360003 - DNA, 25 bp, Artificial
  Probe
agatccaactttggccgttaactgg

SEQ ID NO: 360004 - DNA, 25 bp, Artificial
  Probe
tcccgttactgtggtgattgtgtag

SEQ ID NO: 360005 - DNA, 25 bp, Artificial
  Probe
tgtcctttgtcactgactcacggtt

SEQ ID NO: 360006 - DNA, 25 bp, Artificial
  Probe
ttgtgaagatccaactttggccgtt

SEQ ID NO: 360007 - DNA, 25 bp, Artificial
  Probe
ttgtcctttgtcactgactcacggt

SEQ ID NO: 360008 - DNA, 25 bp, Artificial
  Probe
ctttgtcactgactcacggtttttt

SEQ ID NO: 360009 - DNA, 25 bp, Artificial
  Probe
gattttgtcctttgtcactgactca

SEQ ID NO: 360010 - DNA, 25 bp, Artificial
  Probe
cattgattttgtcctttgtcactga

SEQ ID NO: 360011 - DNA, 25 bp, Artificial
  Probe
tcctttgtcactgactcacggtttt

SEQ ID NO: 360012 - DNA, 25 bp, Artificial
  Probe
attaatagtgacttgtgaagatcca

SEQ ID NO: 360013 - DNA, 25 bp, Artificial
  Probe
gttaactggctttcccgttactgtg

SEQ ID NO: 360014 - DNA, 25 bp, Artificial
  Probe
tgattttgtcctttgtcactgactc

SEQ ID NO: 360015 - DNA, 25 bp, Artificial
  Probe
ctggctttcccgttactgtggtgat

SEQ ID NO: 360016 - DNA, 25 bp, Artificial
  Probe
gggtgtcacattgattttgtccttt

SEQ ID NO: 360017 - DNA, 25 bp, Artificial
  Probe
gtcctttgtcactgactcacggttt

SEQ ID NO: 360018 - DNA, 25 bp, Artificial
  Probe
tttcccgttactgtggtgattgtgt

SEQ ID NO: 360019 - DNA, 25 bp, Artificial
  Probe
ttttgtcctttgtcactgactcacg

SEQ ID NO: 360020 - DNA, 25 bp, Artificial
  Probe
gctttcccgttactgtggtgattgt

SEQ ID NO: 360021 - DNA, 25 bp, Artificial
  Probe
tgaagatccaactttggccgttaac

SEQ ID NO: 360022 - DNA, 25 bp, Artificial
  Probe
atctcatgatctaaattaatagtga

SEQ ID NO: 360023 - DNA, 25 bp, Artificial
  Probe
cctttgtcactgactcacggttttt

SEQ ID NO: 360024 - DNA, 25 bp, Artificial
  Probe
ttcccgttactgtggtgattgtgta

SEQ ID NO: 360025 - DNA, 25 bp, Artificial
  Probe
cactgactcacggtttttttgtgtt

SEQ ID NO: 360026 - DNA, 25 bp, Artificial
  Probe
tgtgggtgtcacattgattttgtcc

SEQ ID NO: 360027 - DNA, 25 bp, Artificial
  Probe
tgggtgtcacattgattttgtcctt

SEQ ID NO: 360028 - DNA, 25 bp, Artificial
  Probe
cccgttactgtggtgattgtgtagg

SEQ ID NO: 360029 - DNA, 25 bp, Artificial
  Probe
cttgtgaagatccaactttggccgt

SEQ ID NO: 360030 - DNA, 25 bp, Artificial
  Probe
aactgaaggaccagtagaagcacct

SEQ ID NO: 360031 - DNA, 25 bp, Artificial
  Probe
gccagcacgctaagtacacttgctc

SEQ ID NO: 360032 - DNA, 25 bp, Artificial
  Probe
cagccagcacgctaagtacacttgc

SEQ ID NO: 360033 - DNA, 25 bp, Artificial
  Probe
gcacgctaagtacacttgctccttc

SEQ ID NO: 360034 - DNA, 25 bp, Artificial
  Probe
aggaccagtagaagcacctcctgag

SEQ ID NO: 360035 - DNA, 25 bp, Artificial
  Probe
cacagtgaagtctgccatcagaaga

SEQ ID NO: 360036 - DNA, 25 bp, Artificial
  Probe
acgctaagtacacttgctccttctg

SEQ ID NO: 360037 - DNA, 25 bp, Artificial
  Probe
cacttgctccttctgtggcaagacc

SEQ ID NO: 360038 - DNA, 25 bp, Artificial
  Probe
aaatcagccagcacgctaagtacac

SEQ ID NO: 360039 - DNA, 25 bp, Artificial
  Probe
gcctggacctacaataccacttctg

SEQ ID NO: 360040 - DNA, 25 bp, Artificial
  Probe
agtcacagtgaagtctgccatcaga

SEQ ID NO: 360041 - DNA, 25 bp, Artificial
  Probe
tggttcctgcatgaaaacagtggcc

SEQ ID NO: 360042 - DNA, 25 bp, Artificial
  Probe
gaagcacctcctgagacttgcctgg

SEQ ID NO: 360043 - DNA, 25 bp, Artificial
  Probe
cgcaccaagaaggtcgggatcgtcg

SEQ ID NO: 360044 - DNA, 25 bp, Artificial
  Probe
tggacctacaataccacttctgcag

SEQ ID NO: 360045 - DNA, 25 bp, Artificial
  Probe
ttctgcagtcacagtgaagtctgcc

SEQ ID NO: 360046 - DNA, 25 bp, Artificial
  Probe
agacttgcctggtctgcaataaatg

SEQ ID NO: 360047 - DNA, 25 bp, Artificial
  Probe
ctgagacttgcctggtctgcaataa

SEQ ID NO: 360048 - DNA, 25 bp, Artificial
  Probe
cagtagaagcacctcctgagacttg

SEQ ID NO: 360049 - DNA, 25 bp, Artificial
  Probe
cacttctgcagtcacagtgaagtct

SEQ ID NO: 360050 - DNA, 25 bp, Artificial
  Probe
ctgcagtcacagtgaagtctgccat

SEQ ID NO: 360051 - DNA, 25 bp, Artificial
  Probe
ggacctacaataccacttctgcagt

SEQ ID NO: 360052 - DNA, 25 bp, Artificial
  Probe
gtggggcctggacctacaataccac

SEQ ID NO: 360053 - DNA, 25 bp, Artificial
  Probe
cacctcctgagacttgcctggtctg

SEQ ID NO: 360054 - DNA, 25 bp, Artificial
  Probe
gtgaagtctgccatcagaagactga

SEQ ID NO: 360055 - DNA, 25 bp, Artificial
  Probe
caataccacttctgcagtcacagtg

SEQ ID NO: 360056 - DNA, 25 bp, Artificial
  Probe
tgaagtctgccatcagaagactgaa

SEQ ID NO: 360057 - DNA, 25 bp, Artificial
  Probe
ttgcctggtctgcaataaatgggct

SEQ ID NO: 360058 - DNA, 25 bp, Artificial
  Probe
acttgctccttctgtggcaagacca

SEQ ID NO: 360059 - DNA, 25 bp, Artificial
  Probe
ttggcatctggcattgtggttcctg

SEQ ID NO: 360060 - DNA, 25 bp, Artificial
  Probe
cgagccgttggcatctggcattgtg

SEQ ID NO: 360061 - DNA, 25 bp, Artificial
  Probe
tgaaatcagccagcacgctaagtac

SEQ ID NO: 360062 - DNA, 25 bp, Artificial
  Probe
cctcctgagacttgcctggtctgca

SEQ ID NO: 360063 - DNA, 25 bp, Artificial
  Probe
ccacttctgcagtcacagtgaagtc

SEQ ID NO: 360064 - DNA, 25 bp, Artificial
  Probe
ggcctggacctacaataccacttct

SEQ ID NO: 360065 - DNA, 25 bp, Artificial
  Probe
cagcacgctaagtacacttgctcct

SEQ ID NO: 360066 - DNA, 25 bp, Artificial
  Probe
gagacgagccgttggcatctggcat

SEQ ID NO: 360067 - DNA, 25 bp, Artificial
  Probe
gctaagtacacttgctccttctgtg

SEQ ID NO: 360068 - DNA, 25 bp, Artificial
  Probe
taccacttctgcagtcacagtgaag

SEQ ID NO: 360069 - DNA, 25 bp, Artificial
  Probe
gaaatcagccagcacgctaagtaca

SEQ ID NO: 360070 - DNA, 25 bp, Artificial
  Probe
ggaaaatacgggacccgctatggtg

SEQ ID NO: 360071 - DNA, 25 bp, Artificial
  Probe
agagacgagccgttggcatctggca

SEQ ID NO: 360072 - DNA, 25 bp, Artificial
  Probe
gttcctgcatgaaaacagtggccgg

SEQ ID NO: 360073 - DNA, 25 bp, Artificial
  Probe
tcctgcatgaaaacagtggccggtg

SEQ ID NO: 360074 - DNA, 25 bp, Artificial
  Probe
aagtacacttgctccttctgtggca

SEQ ID NO: 360075 - DNA, 25 bp, Artificial
  Probe
gaagtctgccatcagaagactgaag

SEQ ID NO: 360076 - DNA, 25 bp, Artificial
  Probe
gtctccagcccaagccaaggggatt

SEQ ID NO: 360077 - DNA, 25 bp, Artificial
  Probe
gaaagagttcctgaagccagacctg

SEQ ID NO: 360078 - DNA, 25 bp, Artificial
  Probe
gcttacaacccattgtggtgttgat

SEQ ID NO: 360079 - DNA, 25 bp, Artificial
  Probe
agattttcttctaccggcgcttctg

SEQ ID NO: 360080 - DNA, 25 bp, Artificial
  Probe
gtgacagctcaaacacagaagtttt

SEQ ID NO: 360081 - DNA, 25 bp, Artificial
  Probe
ttctaccggcgcttctgaagagcct

SEQ ID NO: 360082 - DNA, 25 bp, Artificial
  Probe
gtgcttgtcagtacgctggtagtga

SEQ ID NO: 360083 - DNA, 25 bp, Artificial
  Probe
ctcctttgtgaatcccaaagtctgc

SEQ ID NO: 360084 - DNA, 25 bp, Artificial
  Probe
tatgagatcctgataggaaaagcca

SEQ ID NO: 360085 - DNA, 25 bp, Artificial
  Probe
ccaaagtctgcctagtcatgtatat

SEQ ID NO: 360086 - DNA, 25 bp, Artificial
  Probe
gttcctgaagccagacctgaaggtg

SEQ ID NO: 360087 - DNA, 25 bp, Artificial
  Probe
tctcctttgtgaatcccaaagtctg

SEQ ID NO: 360088 - DNA, 25 bp, Artificial
  Probe
catcctttatgagatcctgatagga

SEQ ID NO: 360089 - DNA, 25 bp, Artificial
  Probe
gggatttcttcctcacgctagagtc

SEQ ID NO: 360090 - DNA, 25 bp, Artificial
  Probe
tgtattgtttgaaatccttgtggcc

SEQ ID NO: 360091 - DNA, 25 bp, Artificial
  Probe
aaggtgaatccaagagcttacaacc

SEQ ID NO: 360092 - DNA, 25 bp, Artificial
  Probe
agcttacaacccattgtggtgttga

SEQ ID NO: 360093 - DNA, 25 bp, Artificial
  Probe
atccttgtggcctggagagtgccta

SEQ ID NO: 360094 - DNA, 25 bp, Artificial
  Probe
ttctgaagagcctattctcctttgt

SEQ ID NO: 360095 - DNA, 25 bp, Artificial
  Probe
agacctgaaggtgaatccaagagct

SEQ ID NO: 360096 - DNA, 25 bp, Artificial
  Probe
cagcccaagccaaggggatttcttc

SEQ ID NO: 360097 - DNA, 25 bp, Artificial
  Probe
atcagaagcagagatcgcagacaaa

SEQ ID NO: 360098 - DNA, 25 bp, Artificial
  Probe
tcagtacgctggtagtgatggctat

SEQ ID NO: 360099 - DNA, 25 bp, Artificial
  Probe
acgagactgacagttgtagaggatc

SEQ ID NO: 360100 - DNA, 25 bp, Artificial
  Probe
ttgtttgaaatccttgtggcctgga

SEQ ID NO: 360101 - DNA, 25 bp, Artificial
  Probe
gagcctattctcctttgtgaatccc

SEQ ID NO: 360102 - DNA, 25 bp, Artificial
  Probe
gagccatcagaagcagagatcgcag

SEQ ID NO: 360103 - DNA, 25 bp, Artificial
  Probe
tttgtgaatcccaaagtctgcctag

SEQ ID NO: 360104 - DNA, 25 bp, Artificial
  Probe
tggcctggagagtgcctagcacact

SEQ ID NO: 360105 - DNA, 25 bp, Artificial
  Probe
caagagcttacaacccattgtggtg

SEQ ID NO: 360106 - DNA, 25 bp, Artificial
  Probe
gcgcttctgaagagcctattctcct

SEQ ID NO: 360107 - DNA, 25 bp, Artificial
  Probe
acaacccattgtggtgttgatacag

SEQ ID NO: 360108 - DNA, 25 bp, Artificial
  Probe
tggagagtgcctagcacacttacaa

SEQ ID NO: 360109 - DNA, 25 bp, Artificial
  Probe
ttgtcagtacgctggtagtgatggc

SEQ ID NO: 360110 - DNA, 25 bp, Artificial
  Probe
ccagcccaagccaaggggatttctt

SEQ ID NO: 360111 - DNA, 25 bp, Artificial
  Probe
ctgtgcttgtcagtacgctggtagt

SEQ ID NO: 360112 - DNA, 25 bp, Artificial
  Probe
ctgcctagtcatgtatatttgtgtt

SEQ ID NO: 360113 - DNA, 25 bp, Artificial
  Probe
ctgtgccagcagtgacagctcaaac

SEQ ID NO: 360114 - DNA, 25 bp, Artificial
  Probe
tgttgatacagattttcttctaccg

SEQ ID NO: 360115 - DNA, 25 bp, Artificial
  Probe
aagagttcctgaagccagacctgaa

SEQ ID NO: 360116 - DNA, 25 bp, Artificial
  Probe
gacagctcaaacacagaagttttct

SEQ ID NO: 360117 - DNA, 25 bp, Artificial
  Probe
aatcccaaagtctgcctagtcatgt

SEQ ID NO: 360118 - DNA, 25 bp, Artificial
  Probe
cccattgtggtgttgatacagattt

SEQ ID NO: 360119 - DNA, 25 bp, Artificial
  Probe
ttctgtgccagcagtgacagctcaa

SEQ ID NO: 360120 - DNA, 25 bp, Artificial
  Probe
cgagactgacagttgtagaggatct

SEQ ID NO: 360121 - DNA, 25 bp, Artificial
  Probe
caagccaaggggatttcttcctcac

SEQ ID NO: 360122 - DNA, 25 bp, Artificial
  Probe
ggggacacctaagtttgtaggactg

SEQ ID NO: 360123 - DNA, 25 bp, Artificial
  Probe
ggactgcaggggacacctaagtttg

SEQ ID NO: 360124 - DNA, 25 bp, Artificial
  Probe
cagcacagtcaccagatgtgacctc

SEQ ID NO: 360125 - DNA, 25 bp, Artificial
  Probe
gacacctaagtttgtaggactgact

SEQ ID NO: 360126 - DNA, 25 bp, Artificial
  Probe
agtttgtaggactgactgaaacaca

SEQ ID NO: 360127 - DNA, 25 bp, Artificial
  Probe
agctccactgtgacttatagggagg

SEQ ID NO: 360128 - DNA, 25 bp, Artificial
  Probe
gggacagcgattccttctctgccct

SEQ ID NO: 360129 - DNA, 25 bp, Artificial
  Probe
ccatggcacccttgtggcacacatg

SEQ ID NO: 360130 - DNA, 25 bp, Artificial
  Probe
tgctgcctagattgggacagcgatt

SEQ ID NO: 360131 - DNA, 25 bp, Artificial
  Probe
aggattagggacctgaccagcacag

SEQ ID NO: 360132 - DNA, 25 bp, Artificial
  Probe
accagcacagtcaccagatgtgacc

SEQ ID NO: 360133 - DNA, 25 bp, Artificial
  Probe
tgcaggggacacctaagtttgtagg

SEQ ID NO: 360134 - DNA, 25 bp, Artificial
  Probe
tgacagaggtgtccagcttccacct

SEQ ID NO: 360135 - DNA, 25 bp, Artificial
  Probe
aacttagctccactgtgacttatag

SEQ ID NO: 360136 - DNA, 25 bp, Artificial
  Probe
aattgccacctgaaggaaacagaaa

SEQ ID NO: 360137 - DNA, 25 bp, Artificial
  Probe
ccagatgtgacctctgagagaggat

SEQ ID NO: 360138 - DNA, 25 bp, Artificial
  Probe
ctgctgcctagattgggacagcgat

SEQ ID NO: 360139 - DNA, 25 bp, Artificial
  Probe
atggcacccttgtggcacacatgcc

SEQ ID NO: 360140 - DNA, 25 bp, Artificial
  Probe
acccttactctgctgcctagattgg

SEQ ID NO: 360141 - DNA, 25 bp, Artificial
  Probe
gtcaccagatgtgacctctgagaga

SEQ ID NO: 360142 - DNA, 25 bp, Artificial
  Probe
agcagcccagccactgtggaaggat

SEQ ID NO: 360143 - DNA, 25 bp, Artificial
  Probe
gcaggggacacctaagtttgtagga

SEQ ID NO: 360144 - DNA, 25 bp, Artificial
  Probe
tactctgctgcctagattgggacag

SEQ ID NO: 360145 - DNA, 25 bp, Artificial
  Probe
tgccacctgaaggaaacagaaagag

SEQ ID NO: 360146 - DNA, 25 bp, Artificial
  Probe
gagggaattgccacctgaaggaaac

SEQ ID NO: 360147 - DNA, 25 bp, Artificial
  Probe
gattagggacctgaccagcacagtc

SEQ ID NO: 360148 - DNA, 25 bp, Artificial
  Probe
cccttactctgctgcctagattggg

SEQ ID NO: 360149 - DNA, 25 bp, Artificial
  Probe
ccagccactgtggaaggattaggga

SEQ ID NO: 360150 - DNA, 25 bp, Artificial
  Probe
tgccctcaacttagctccactgtga

SEQ ID NO: 360151 - DNA, 25 bp, Artificial
  Probe
ccagcacagtcaccagatgtgacct

SEQ ID NO: 360152 - DNA, 25 bp, Artificial
  Probe
agggaattgccacctgaaggaaaca

SEQ ID NO: 360153 - DNA, 25 bp, Artificial
  Probe
gcctagattgggacagcgattcctt

SEQ ID NO: 360154 - DNA, 25 bp, Artificial
  Probe
ccactgtggaaggattagggacctg

SEQ ID NO: 360155 - DNA, 25 bp, Artificial
  Probe
gcccagccactgtggaaggattagg

SEQ ID NO: 360156 - DNA, 25 bp, Artificial
  Probe
acctaagtttgtaggactgactgaa

SEQ ID NO: 360157 - DNA, 25 bp, Artificial
  Probe
acttagctccactgtgacttatagg

SEQ ID NO: 360158 - DNA, 25 bp, Artificial
  Probe
tagggacctgaccagcacagtcacc

SEQ ID NO: 360159 - DNA, 25 bp, Artificial
  Probe
acctgaccagcacagtcaccagatg

SEQ ID NO: 360160 - DNA, 25 bp, Artificial
  Probe
aagtttgtaggactgactgaaacac

SEQ ID NO: 360161 - DNA, 25 bp, Artificial
  Probe
tgaccagcacagtcaccagatgtga

SEQ ID NO: 360162 - DNA, 25 bp, Artificial
  Probe
cagatgtgacctctgagagaggatg

SEQ ID NO: 360163 - DNA, 25 bp, Artificial
  Probe
cacccttactctgctgcctagattg

SEQ ID NO: 360164 - DNA, 25 bp, Artificial
  Probe
cctgaccagcacagtcaccagatgt

SEQ ID NO: 360165 - DNA, 25 bp, Artificial
  Probe
acagaggtgtccagcttccacctct

SEQ ID NO: 360166 - DNA, 25 bp, Artificial
  Probe
attgggacagcgattccttctctgc

SEQ ID NO: 360167 - DNA, 25 bp, Artificial
  Probe
acagtcaccagatgtgacctctgag

SEQ ID NO: 360168 - DNA, 25 bp, Artificial
  Probe
cccttggtaagcaagtagtatagtt

SEQ ID NO: 360169 - DNA, 25 bp, Artificial
  Probe
tgctttagtttgataagcagccttg

SEQ ID NO: 360170 - DNA, 25 bp, Artificial
  Probe
ttacattcctgactggagatgacct

SEQ ID NO: 360171 - DNA, 25 bp, Artificial
  Probe
cacaagcgcccgtaggggccagcaa

SEQ ID NO: 360172 - DNA, 25 bp, Artificial
  Probe
cagtccacaaacacagacacacgtg

SEQ ID NO: 360173 - DNA, 25 bp, Artificial
  Probe
accctagcaggtagaagaactggtg

SEQ ID NO: 360174 - DNA, 25 bp, Artificial
  Probe
tctctagaaacagagacgaagaagc

SEQ ID NO: 360175 - DNA, 25 bp, Artificial
  Probe
agcgaggcccgtgcacacactctgt

SEQ ID NO: 360176 - DNA, 25 bp, Artificial
  Probe
cctcggtgcatatctcactctcttg

SEQ ID NO: 360177 - DNA, 25 bp, Artificial
  Probe
cttgtactcgtctccggtacttcac

SEQ ID NO: 360178 - DNA, 25 bp, Artificial
  Probe
actgacctcacaagcgcccgtaggg

SEQ ID NO: 360179 - DNA, 25 bp, Artificial
  Probe
cgtaggggccagcaacccctcggtg

SEQ ID NO: 360180 - DNA, 25 bp, Artificial
  Probe
gccttgtcatctctaagagatcgaa

SEQ ID NO: 360181 - DNA, 25 bp, Artificial
  Probe
gaccttggcaatgactgaccacctc

SEQ ID NO: 360182 - DNA, 25 bp, Artificial
  Probe
tgcccccttggtaagcaagtagtat

SEQ ID NO: 360183 - DNA, 25 bp, Artificial
  Probe
tcactctcttgtactcgtctccggt

SEQ ID NO: 360184 - DNA, 25 bp, Artificial
  Probe
ggtgcatatctcactctcttgtact

SEQ ID NO: 360185 - DNA, 25 bp, Artificial
  Probe
actggtgaaggcttgaccttggcaa

SEQ ID NO: 360186 - DNA, 25 bp, Artificial
  Probe
atagcaggcaagtgggcccccgtag

SEQ ID NO: 360187 - DNA, 25 bp, Artificial
  Probe
ggagtcaacaactcattctctagaa

SEQ ID NO: 360188 - DNA, 25 bp, Artificial
  Probe
acacgtgtgaagatagctggccagc

SEQ ID NO: 360189 - DNA, 25 bp, Artificial
  Probe
ctctacagacatagagaaaagtttg

SEQ ID NO: 360190 - DNA, 25 bp, Artificial
  Probe
atgataagtccctgtaggacccagc

SEQ ID NO: 360191 - DNA, 25 bp, Artificial
  Probe
taggggccagcaacccctcggtgca

SEQ ID NO: 360192 - DNA, 25 bp, Artificial
  Probe
cgaaagcaggcctactccagctgca

SEQ ID NO: 360193 - DNA, 25 bp, Artificial
  Probe
tagtttgataagcagccttgtcatc

SEQ ID NO: 360194 - DNA, 25 bp, Artificial
  Probe
tgaccttcattttggccacatgaag

SEQ ID NO: 360195 - DNA, 25 bp, Artificial
  Probe
aaggagtcaacaactcattctctag

SEQ ID NO: 360196 - DNA, 25 bp, Artificial
  Probe
cctcttgtaaggagtcaacaactca

SEQ ID NO: 360197 - DNA, 25 bp, Artificial
  Probe
ttcctgactggagatgaccttcatt

SEQ ID NO: 360198 - DNA, 25 bp, Artificial
  Probe
agctggccagcgaggcccgtgcaca

SEQ ID NO: 360199 - DNA, 25 bp, Artificial
  Probe
ttcattttggccacatgaaggactg

SEQ ID NO: 360200 - DNA, 25 bp, Artificial
  Probe
aagcaggcctactccagctgcacga

SEQ ID NO: 360201 - DNA, 25 bp, Artificial
  Probe
atctctaagagatcgaaagcaggcc

SEQ ID NO: 360202 - DNA, 25 bp, Artificial
  Probe
agacgaagaagcactctctacagac

SEQ ID NO: 360203 - DNA, 25 bp, Artificial
  Probe
aactcattctctagaaacagagacg

SEQ ID NO: 360204 - DNA, 25 bp, Artificial
  Probe
ctactccagctgcacgaccttgtta

SEQ ID NO: 360205 - DNA, 25 bp, Artificial
  Probe
gcagtcatgggtatagcaggcaagt

SEQ ID NO: 360206 - DNA, 25 bp, Artificial
  Probe
acaagcgcccgtaggggccagcaac

SEQ ID NO: 360207 - DNA, 25 bp, Artificial
  Probe
ctctgttcgggatgataagtccctg

SEQ ID NO: 360208 - DNA, 25 bp, Artificial
  Probe
gtttgctttagtttgataagcagcc

SEQ ID NO: 360209 - DNA, 25 bp, Artificial
  Probe
ccgtagtcaccctagcaggtagaag

SEQ ID NO: 360210 - DNA, 25 bp, Artificial
  Probe
cttcacattacattcctgactggag

SEQ ID NO: 360211 - DNA, 25 bp, Artificial
  Probe
gcacgaccttgttaatccagtccac

SEQ ID NO: 360212 - DNA, 25 bp, Artificial
  Probe
cacacactctgttcgggatgataag

SEQ ID NO: 360213 - DNA, 25 bp, Artificial
  Probe
actctgttcgggatgataagtccct

SEQ ID NO: 360214 - DNA, 25 bp, Artificial
  Probe
acagcttcctgaagcgggtgaagga

SEQ ID NO: 360215 - DNA, 25 bp, Artificial
  Probe
ctaacggaaaggagcctgagctgct

SEQ ID NO: 360216 - DNA, 25 bp, Artificial
  Probe
cactttgtgaggactaacggaaagg

SEQ ID NO: 360217 - DNA, 25 bp, Artificial
  Probe
atcaatgtgcggattgagcacatca

SEQ ID NO: 360218 - DNA, 25 bp, Artificial
  Probe
tgggcatcattgtgaacaagcaagt

SEQ ID NO: 360219 - DNA, 25 bp, Artificial
  Probe
aaggaatgccccataagtgttacca

SEQ ID NO: 360220 - DNA, 25 bp, Artificial
  Probe
attctggccaagaggatcaatgtgc

SEQ ID NO: 360221 - DNA, 25 bp, Artificial
  Probe
ctgctggagcccattccatacgaat

SEQ ID NO: 360222 - DNA, 25 bp, Artificial
  Probe
catgccgtgggcatcattgtgaaca

SEQ ID NO: 360223 - DNA, 25 bp, Artificial
  Probe
agacatcaagggaatgggcactgtt

SEQ ID NO: 360224 - DNA, 25 bp, Artificial
  Probe
gaccttttaggaaacatggagtcgt

SEQ ID NO: 360225 - DNA, 25 bp, Artificial
  Probe
gggttcagcttaacggccagcctgc

SEQ ID NO: 360226 - DNA, 25 bp, Artificial
  Probe
gggcagccatcttccagtaactcgc

SEQ ID NO: 360227 - DNA, 25 bp, Artificial
  Probe
aaggagcctgagctgctggagccca

SEQ ID NO: 360228 - DNA, 25 bp, Artificial
  Probe
atgggcactgttcaaaaaggaatgc

SEQ ID NO: 360229 - DNA, 25 bp, Artificial
  Probe
tgcggattgagcacatcaagcactc

SEQ ID NO: 360230 - DNA, 25 bp, Artificial
  Probe
taaaggcaagattctggccaagagg

SEQ ID NO: 360231 - DNA, 25 bp, Artificial
  Probe
gaattcatggcctaatgtatacaaa

SEQ ID NO: 360232 - DNA, 25 bp, Artificial
  Probe
taccatggcaaaaccggaagagtct

SEQ ID NO: 360233 - DNA, 25 bp, Artificial
  Probe
ggcaaaaccggaagagtctacaatg

SEQ ID NO: 360234 - DNA, 25 bp, Artificial
  Probe
ttcaaaaaggaatgccccataagtg

SEQ ID NO: 360235 - DNA, 25 bp, Artificial
  Probe
catcattgtgaacaagcaagttaaa

SEQ ID NO: 360236 - DNA, 25 bp, Artificial
  Probe
actaacggaaaggagcctgagctgc

SEQ ID NO: 360237 - DNA, 25 bp, Artificial
  Probe
cagtaactcgccaaaatgacgaaca

SEQ ID NO: 360238 - DNA, 25 bp, Artificial
  Probe
gttcctttggccacatacatgcgaa

SEQ ID NO: 360239 - DNA, 25 bp, Artificial
  Probe
cactcaaagagcagagacagcttcc

SEQ ID NO: 360240 - DNA, 25 bp, Artificial
  Probe
gaaacatggagtcgttcctttggcc

SEQ ID NO: 360241 - DNA, 25 bp, Artificial
  Probe
aagattctggccaagaggatcaatg

SEQ ID NO: 360242 - DNA, 25 bp, Artificial
  Probe
ccagagaagcccactttgtgaggac

SEQ ID NO: 360243 - DNA, 25 bp, Artificial
  Probe
ttccatacgaattcatggcctaatg

SEQ ID NO: 360244 - DNA, 25 bp, Artificial
  Probe
gagtcgttcctttggccacatacat

SEQ ID NO: 360245 - DNA, 25 bp, Artificial
  Probe
aaccggaagagtctacaatgtcacc

SEQ ID NO: 360246 - DNA, 25 bp, Artificial
  Probe
tcgccaaaatgacgaacacaaaagg

SEQ ID NO: 360247 - DNA, 25 bp, Artificial
  Probe
agagcagagacagcttcctgaagcg

SEQ ID NO: 360248 - DNA, 25 bp, Artificial
  Probe
ctgagctgctggagcccattccata

SEQ ID NO: 360249 - DNA, 25 bp, Artificial
  Probe
tgtcacccagcatgccgtgggcatc

SEQ ID NO: 360250 - DNA, 25 bp, Artificial
  Probe
ttgtagacatcaagggaatgggcac

SEQ ID NO: 360251 - DNA, 25 bp, Artificial
  Probe
aagagtctacaatgtcacccagcat

SEQ ID NO: 360252 - DNA, 25 bp, Artificial
  Probe
catgcgaatctacaagaagggtgat

SEQ ID NO: 360253 - DNA, 25 bp, Artificial
  Probe
ccatacgaattcatggcctaatgta

SEQ ID NO: 360254 - DNA, 25 bp, Artificial
  Probe
acaatgtcacccagcatgccgtggg

SEQ ID NO: 360255 - DNA, 25 bp, Artificial
  Probe
gcccattccatacgaattcatggcc

SEQ ID NO: 360256 - DNA, 25 bp, Artificial
  Probe
aggggtactcggtatatgttctcta

SEQ ID NO: 360257 - DNA, 25 bp, Artificial
  Probe
aagagaagggcacctgggttcagct

SEQ ID NO: 360258 - DNA, 25 bp, Artificial
  Probe
cccagcatgccgtgggcatcattgt

SEQ ID NO: 360259 - DNA, 25 bp, Artificial
  Probe
gccacccagagaagcccactttgtg

SEQ ID NO: 360260 - DNA, 25 bp, Artificial
  Probe
ctatgcaaagccagcttcctccgat

SEQ ID NO: 360261 - DNA, 25 bp, Artificial
  Probe
caagatctcaactccctggtctcag

SEQ ID NO: 360262 - DNA, 25 bp, Artificial
  Probe
tctcaactccctggtctcagagagc

SEQ ID NO: 360263 - DNA, 25 bp, Artificial
  Probe
ccaacacaataaggtggtatcgtca

SEQ ID NO: 360264 - DNA, 25 bp, Artificial
  Probe
tgagactgggcatctgctccctagg

SEQ ID NO: 360265 - DNA, 25 bp, Artificial
  Probe
ggtggtatcgtcattatccacagtg

SEQ ID NO: 360266 - DNA, 25 bp, Artificial
  Probe
caggtggtttctggtgctaggtcat

SEQ ID NO: 360267 - DNA, 25 bp, Artificial
  Probe
ggacatgtgcccagatgaatgtttt

SEQ ID NO: 360268 - DNA, 25 bp, Artificial
  Probe
cctcagggtccctctgagactgggc

SEQ ID NO: 360269 - DNA, 25 bp, Artificial
  Probe
tccctctgagactgggcatctgctc

SEQ ID NO: 360270 - DNA, 25 bp, Artificial
  Probe
gaaactgaggctcagagagcgagct

SEQ ID NO: 360271 - DNA, 25 bp, Artificial
  Probe
ttgtgtaaaagttgctcctgtcatc

SEQ ID NO: 360272 - DNA, 25 bp, Artificial
  Probe
cggggcttcctcagggtccctctga

SEQ ID NO: 360273 - DNA, 25 bp, Artificial
  Probe
ctttacattggcagccagaggtcct

SEQ ID NO: 360274 - DNA, 25 bp, Artificial
  Probe
tgagggactgagctgtgtgttcttc

SEQ ID NO: 360275 - DNA, 25 bp, Artificial
  Probe
gtcagtgtcccctgaacatctgcat

SEQ ID NO: 360276 - DNA, 25 bp, Artificial
  Probe
ctgcattctgtgagggactgagctg

SEQ ID NO: 360277 - DNA, 25 bp, Artificial
  Probe
gaagcttagctctgtcctatactca

SEQ ID NO: 360278 - DNA, 25 bp, Artificial
  Probe
ggatatggtcagtgtcccctgaaca

SEQ ID NO: 360279 - DNA, 25 bp, Artificial
  Probe
atatggtcagtgtcccctgaacatc

SEQ ID NO: 360280 - DNA, 25 bp, Artificial
  Probe
acattggcagccagaggtcctgagc

SEQ ID NO: 360281 - DNA, 25 bp, Artificial
  Probe
gtctctcagatgacaacaatgttaa

SEQ ID NO: 360282 - DNA, 25 bp, Artificial
  Probe
ccctaggatatggtcagtgtcccct

SEQ ID NO: 360283 - DNA, 25 bp, Artificial
  Probe
attggcagccagaggtcctgagccg

SEQ ID NO: 360284 - DNA, 25 bp, Artificial
  Probe
gatgaatgttttgtcccatatctct

SEQ ID NO: 360285 - DNA, 25 bp, Artificial
  Probe
ccacagtgacagatggggaaactga

SEQ ID NO: 360286 - DNA, 25 bp, Artificial
  Probe
tgagccggggcttcctcagggtccc

SEQ ID NO: 360287 - DNA, 25 bp, Artificial
  Probe
tcccctttacattggcagccagagg

SEQ ID NO: 360288 - DNA, 25 bp, Artificial
  Probe
acatcttaatagtggcaaggcaggt

SEQ ID NO: 360289 - DNA, 25 bp, Artificial
  Probe
ctccgtcctggacatgtgcccagat

SEQ ID NO: 360290 - DNA, 25 bp, Artificial
  Probe
cggcaatctgcaaacatcttaatag

SEQ ID NO: 360291 - DNA, 25 bp, Artificial
  Probe
gtcctggacatgtgcccagatgaat

SEQ ID NO: 360292 - DNA, 25 bp, Artificial
  Probe
ctgaagctaaccaggccatctcttc

SEQ ID NO: 360293 - DNA, 25 bp, Artificial
  Probe
cctcccgtagtctgaagctaaccag

SEQ ID NO: 360294 - DNA, 25 bp, Artificial
  Probe
tgcccagatgaatgttttgtcccat

SEQ ID NO: 360295 - DNA, 25 bp, Artificial
  Probe
gtaaaagttgctcctgtcatcccct

SEQ ID NO: 360296 - DNA, 25 bp, Artificial
  Probe
gtgttttagagctgccgggaagctt

SEQ ID NO: 360297 - DNA, 25 bp, Artificial
  Probe
ccgggaagcttagctctgtcctata

SEQ ID NO: 360298 - DNA, 25 bp, Artificial
  Probe
gcaaagccagcttcctccgattttc

SEQ ID NO: 360299 - DNA, 25 bp, Artificial
  Probe
gttttgtcccatatctctggcttcc

SEQ ID NO: 360300 - DNA, 25 bp, Artificial
  Probe
tctggcttcccctttacattggcag

SEQ ID NO: 360301 - DNA, 25 bp, Artificial
  Probe
tcttcatcccaacacaataaggtgg

SEQ ID NO: 360302 - DNA, 25 bp, Artificial
  Probe
gctgtgtgttcttcatcccaacaca

SEQ ID NO: 360303 - DNA, 25 bp, Artificial
  Probe
ccctgtctctcagatgacaacaatg

SEQ ID NO: 360304 - DNA, 25 bp, Artificial
  Probe
ccttgcaaggatagtcagtgttccc

SEQ ID NO: 360305 - DNA, 25 bp, Artificial
  Probe
ccagaggtcctgagccggggcttcc

SEQ ID NO: 360306 - DNA, 25 bp, Artificial
  Probe
ctatcaatcattaccggggattccc

SEQ ID NO: 360307 - DNA, 25 bp, Artificial
  Probe
agccataagggcaccacgagactca

SEQ ID NO: 360308 - DNA, 25 bp, Artificial
  Probe
taaggcatacccaagccataagggc

SEQ ID NO: 360309 - DNA, 25 bp, Artificial
  Probe
tcattaccggggattccctttgcct

SEQ ID NO: 360310 - DNA, 25 bp, Artificial
  Probe
tcctgcaatcccaatattaagaggt

SEQ ID NO: 360311 - DNA, 25 bp, Artificial
  Probe
atacccaagccataagggcaccacg

SEQ ID NO: 360312 - DNA, 25 bp, Artificial
  Probe
acccaagccataagggcaccacgag

SEQ ID NO: 360313 - DNA, 25 bp, Artificial
  Probe
ctgctcttattagagaaagaacttt

SEQ ID NO: 360314 - DNA, 25 bp, Artificial
  Probe
gtgctcctgcaatcccaatattaag

SEQ ID NO: 360315 - DNA, 25 bp, Artificial
  Probe
agaagagatttttctccagagtact

SEQ ID NO: 360316 - DNA, 25 bp, Artificial
  Probe
tactcagtgagatagactagtgtca

SEQ ID NO: 360317 - DNA, 25 bp, Artificial
  Probe
gaagagacaccacctcgtcccagat

SEQ ID NO: 360318 - DNA, 25 bp, Artificial
  Probe
cagagtactcagtgagatagactag

SEQ ID NO: 360319 - DNA, 25 bp, Artificial
  Probe
ggtggtgtgctcctgcaatcccaat

SEQ ID NO: 360320 - DNA, 25 bp, Artificial
  Probe
ttcaagatctctgctcttattagag

SEQ ID NO: 360321 - DNA, 25 bp, Artificial
  Probe
gagtcaggccacagcctttctataa

SEQ ID NO: 360322 - DNA, 25 bp, Artificial
  Probe
gaaacataagtcctgcagtctaagg

SEQ ID NO: 360323 - DNA, 25 bp, Artificial
  Probe
tgtcaagccagatggggcaactcct

SEQ ID NO: 360324 - DNA, 25 bp, Artificial
  Probe
gacttgtcttcaagatctctgctct

SEQ ID NO: 360325 - DNA, 25 bp, Artificial
  Probe
atagactagtgtcaagccagatggg

SEQ ID NO: 360326 - DNA, 25 bp, Artificial
  Probe
gagagtcaggccacagcctttctat

SEQ ID NO: 360327 - DNA, 25 bp, Artificial
  Probe
aaggcatacccaagccataagggca

SEQ ID NO: 360328 - DNA, 25 bp, Artificial
  Probe
tctgcacctcataggcaacaaaaga

SEQ ID NO: 360329 - DNA, 25 bp, Artificial
  Probe
gccagatggggcaactcctggctct

SEQ ID NO: 360330 - DNA, 25 bp, Artificial
  Probe
gcaactcctggctcttggcctggga

SEQ ID NO: 360331 - DNA, 25 bp, Artificial
  Probe
gattcagacaacagatccgaaaact

SEQ ID NO: 360332 - DNA, 25 bp, Artificial
  Probe
tggaagagacaccacctcgtcccag

SEQ ID NO: 360333 - DNA, 25 bp, Artificial
  Probe
tacatgggcatggtggtgtgctcct

SEQ ID NO: 360334 - DNA, 25 bp, Artificial
  Probe
ctaggcttccggtgtctactaaatg

SEQ ID NO: 360335 - DNA, 25 bp, Artificial
  Probe
cataagggcaccacgagactcagat

SEQ ID NO: 360336 - DNA, 25 bp, Artificial
  Probe
cacgagactcagatgagaagagatt

SEQ ID NO: 360337 - DNA, 25 bp, Artificial
  Probe
tggctcttggcctgggacttgtctt

SEQ ID NO: 360338 - DNA, 25 bp, Artificial
  Probe
actcactaggcttccggtgtctact

SEQ ID NO: 360339 - DNA, 25 bp, Artificial
  Probe
tagtgtcaagccagatggggcaact

SEQ ID NO: 360340 - DNA, 25 bp, Artificial
  Probe
aactcactaggcttccggtgtctac

SEQ ID NO: 360341 - DNA, 25 bp, Artificial
  Probe
aactcctggctcttggcctgggact

SEQ ID NO: 360342 - DNA, 25 bp, Artificial
  Probe
atgctgagagtcaggccacagcctt

SEQ ID NO: 360343 - DNA, 25 bp, Artificial
  Probe
gcctttctataaacatcactggaag

SEQ ID NO: 360344 - DNA, 25 bp, Artificial
  Probe
atcactggaagagacaccacctcgt

SEQ ID NO: 360345 - DNA, 25 bp, Artificial
  Probe
tgcctctgcacctcataggcaacaa

SEQ ID NO: 360346 - DNA, 25 bp, Artificial
  Probe
ccctaagctatcaatcattaccggg

SEQ ID NO: 360347 - DNA, 25 bp, Artificial
  Probe
acaacagatccgaaaactcactagg

SEQ ID NO: 360348 - DNA, 25 bp, Artificial
  Probe
ttacatgggcatggtggtgtgctcc

SEQ ID NO: 360349 - DNA, 25 bp, Artificial
  Probe
ggcatggtggtgtgctcctgcaatc

SEQ ID NO: 360350 - DNA, 25 bp, Artificial
  Probe
agtctaaggcatacccaagccataa

SEQ ID NO: 360351 - DNA, 25 bp, Artificial
  Probe
ggggattccctttgcctctgcacct

SEQ ID NO: 360352 - DNA, 25 bp, Artificial
  Probe
accagtcgagctctgctccaattgc

SEQ ID NO: 360353 - DNA, 25 bp, Artificial
  Probe
gtcagtagctgcagcctttagttgg

SEQ ID NO: 360354 - DNA, 25 bp, Artificial
  Probe
ccggagtcagacagccgtgtatcat

SEQ ID NO: 360355 - DNA, 25 bp, Artificial
  Probe
tggatgcaccagtcgagctctgctc

SEQ ID NO: 360356 - DNA, 25 bp, Artificial
  Probe
ttgcccataaaagtgtatgctccat

SEQ ID NO: 360357 - DNA, 25 bp, Artificial
  Probe
ctcccaagcttttcacgtggatgca

SEQ ID NO: 360358 - DNA, 25 bp, Artificial
  Probe
ataagccttccctagtcatgcattg

SEQ ID NO: 360359 - DNA, 25 bp, Artificial
  Probe
acagccgtgtatcatgccgtcacac

SEQ ID NO: 360360 - DNA, 25 bp, Artificial
  Probe
ttccttgagtgttccccgtcagtag

SEQ ID NO: 360361 - DNA, 25 bp, Artificial
  Probe
tggcacactagtcaccagcaccttg

SEQ ID NO: 360362 - DNA, 25 bp, Artificial
  Probe
gtagctgcagcctttagttggtggc

SEQ ID NO: 360363 - DNA, 25 bp, Artificial
  Probe
gatcctctgctccagtgtcatttcc

SEQ ID NO: 360364 - DNA, 25 bp, Artificial
  Probe
tgattcgcagctacccactagattc

SEQ ID NO: 360365 - DNA, 25 bp, Artificial
  Probe
aaagtgtatgctccataagggctgg

SEQ ID NO: 360366 - DNA, 25 bp, Artificial
  Probe
gcaaagcagtgtctcccataaccac

SEQ ID NO: 360367 - DNA, 25 bp, Artificial
  Probe
gtcagacagccgtgtatcatgccgt

SEQ ID NO: 360368 - DNA, 25 bp, Artificial
  Probe
ttcccatgatcctctgctccagtgt

SEQ ID NO: 360369 - DNA, 25 bp, Artificial
  Probe
tagctgcagcctttagttggtggca

SEQ ID NO: 360370 - DNA, 25 bp, Artificial
  Probe
tgcagcctttagttggtggcacact

SEQ ID NO: 360371 - DNA, 25 bp, Artificial
  Probe
agcaccttgcccataaaagtgtatg

SEQ ID NO: 360372 - DNA, 25 bp, Artificial
  Probe
atcaaatctccagcttccttgagtg

SEQ ID NO: 360373 - DNA, 25 bp, Artificial
  Probe
cagcttccttgagtgttccccgtca

SEQ ID NO: 360374 - DNA, 25 bp, Artificial
  Probe
gtgtcatttccttgtataagccttc

SEQ ID NO: 360375 - DNA, 25 bp, Artificial
  Probe
tgtgtggattcacattcaccccagc

SEQ ID NO: 360376 - DNA, 25 bp, Artificial
  Probe
gatgcaccagtcgagctctgctcca

SEQ ID NO: 360377 - DNA, 25 bp, Artificial
  Probe
gagtgttccccgtcagtagctgcag

SEQ ID NO: 360378 - DNA, 25 bp, Artificial
  Probe
gtcatgcattgcaaagcagtgtctc

SEQ ID NO: 360379 - DNA, 25 bp, Artificial
  Probe
tagtcatgcattgcaaagcagtgtc

SEQ ID NO: 360380 - DNA, 25 bp, Artificial
  Probe
ccgtccagtaagtccctgaaggagg

SEQ ID NO: 360381 - DNA, 25 bp, Artificial
  Probe
ccctagtcatgcattgcaaagcagt

SEQ ID NO: 360382 - DNA, 25 bp, Artificial
  Probe
gcctttagttggtggcacactagtc

SEQ ID NO: 360383 - DNA, 25 bp, Artificial
  Probe
agcctttagttggtggcacactagt

SEQ ID NO: 360384 - DNA, 25 bp, Artificial
  Probe
gctctgctccaattgccaattcttg

SEQ ID NO: 360385 - DNA, 25 bp, Artificial
  Probe
cacgtgccaggcaccggagtcagac

SEQ ID NO: 360386 - DNA, 25 bp, Artificial
  Probe
cctctgctccagtgtcatttccttg

SEQ ID NO: 360387 - DNA, 25 bp, Artificial
  Probe
ccatgatcctctgctccagtgtcat

SEQ ID NO: 360388 - DNA, 25 bp, Artificial
  Probe
gccaggcaccggagtcagacagccg

SEQ ID NO: 360389 - DNA, 25 bp, Artificial
  Probe
tgtaaactcccaagcttttcacgtg

SEQ ID NO: 360390 - DNA, 25 bp, Artificial
  Probe
ttgtataagccttccctagtcatgc

SEQ ID NO: 360391 - DNA, 25 bp, Artificial
  Probe
cttgtataagccttccctagtcatg

SEQ ID NO: 360392 - DNA, 25 bp, Artificial
  Probe
tccagcttccttgagtgttccccgt

SEQ ID NO: 360393 - DNA, 25 bp, Artificial
  Probe
gagctctgctccaattgccaattct

SEQ ID NO: 360394 - DNA, 25 bp, Artificial
  Probe
ctctgattcgcagctacccactaga

SEQ ID NO: 360395 - DNA, 25 bp, Artificial
  Probe
atctccagcttccttgagtgttccc

SEQ ID NO: 360396 - DNA, 25 bp, Artificial
  Probe
cagtcgagctctgctccaattgcca

SEQ ID NO: 360397 - DNA, 25 bp, Artificial
  Probe
ttagttggtggcacactagtcacca

SEQ ID NO: 360398 - DNA, 25 bp, Artificial
  Probe
cttggggagcaggctcaggcttcca

SEQ ID NO: 360399 - DNA, 25 bp, Artificial
  Probe
ccacaggattgtaactggagcagac

SEQ ID NO: 360400 - DNA, 25 bp, Artificial
  Probe
cccttgggagccacaggattgtaac

SEQ ID NO: 360401 - DNA, 25 bp, Artificial
  Probe
tcaggcttccacagccccatcccaa

SEQ ID NO: 360402 - DNA, 25 bp, Artificial
  Probe
acaggaaacccttggggagcaggct

SEQ ID NO: 360403 - DNA, 25 bp, Artificial
  Probe
atgcccttgggagccacaggattgt

SEQ ID NO: 360404 - DNA, 25 bp, Artificial
  Probe
gcaggctcaggcttccacagcccca

SEQ ID NO: 360405 - DNA, 25 bp, Artificial
  Probe
ttggggagcaggctcaggcttccac

SEQ ID NO: 360406 - DNA, 25 bp, Artificial
  Probe
aaacccttggggagcaggctcaggc

SEQ ID NO: 360407 - DNA, 25 bp, Artificial
  Probe
ttgggagccacaggattgtaactgg

SEQ ID NO: 360408 - DNA, 25 bp, Artificial
  Probe
gggagcaggctcaggcttccacagc

SEQ ID NO: 360409 - DNA, 25 bp, Artificial
  Probe
tggggagcaggctcaggcttccaca

SEQ ID NO: 360410 - DNA, 25 bp, Artificial
  Probe
agcagacaggaaacccttggggagc

SEQ ID NO: 360411 - DNA, 25 bp, Artificial
  Probe
aacccttggggagcaggctcaggct

SEQ ID NO: 360412 - DNA, 25 bp, Artificial
  Probe
ggaaacccttggggagcaggctcag

SEQ ID NO: 360413 - DNA, 25 bp, Artificial
  Probe
cccttggggagcaggctcaggcttc

SEQ ID NO: 360414 - DNA, 25 bp, Artificial
  Probe
gcagacaggaaacccttggggagca

SEQ ID NO: 360415 - DNA, 25 bp, Artificial
  Probe
tgggagccacaggattgtaactgga

SEQ ID NO: 360416 - DNA, 25 bp, Artificial
  Probe
tgcccttgggagccacaggattgta

SEQ ID NO: 360417 - DNA, 25 bp, Artificial
  Probe
ccttgggagccacaggattgtaact

SEQ ID NO: 360418 - DNA, 25 bp, Artificial
  Probe
agccacaggattgtaactggagcag

SEQ ID NO: 360419 - DNA, 25 bp, Artificial
  Probe
gagcagacaggaaacccttggggag

SEQ ID NO: 360420 - DNA, 25 bp, Artificial
  Probe
gccacaggattgtaactggagcaga

SEQ ID NO: 360421 - DNA, 25 bp, Artificial
  Probe
gacaggaaacccttggggagcaggc

SEQ ID NO: 360422 - DNA, 25 bp, Artificial
  Probe
agacaggaaacccttggggagcagg

SEQ ID NO: 360423 - DNA, 25 bp, Artificial
  Probe
aggaaacccttggggagcaggctca

SEQ ID NO: 360424 - DNA, 25 bp, Artificial
  Probe
caggaaacccttggggagcaggctc

SEQ ID NO: 360425 - DNA, 25 bp, Artificial
  Probe
agcaggctcaggcttccacagcccc

SEQ ID NO: 360426 - DNA, 25 bp, Artificial
  Probe
gtaactggagcagacaggaaaccct

SEQ ID NO: 360427 - DNA, 25 bp, Artificial
  Probe
ttgtaactggagcagacaggaaacc

SEQ ID NO: 360428 - DNA, 25 bp, Artificial
  Probe
gcccttgggagccacaggattgtaa

SEQ ID NO: 360429 - DNA, 25 bp, Artificial
  Probe
ggctcaggcttccacagccccatcc

SEQ ID NO: 360430 - DNA, 25 bp, Artificial
  Probe
ccttggggagcaggctcaggcttcc

SEQ ID NO: 360431 - DNA, 25 bp, Artificial
  Probe
cttgggagccacaggattgtaactg

SEQ ID NO: 360432 - DNA, 25 bp, Artificial
  Probe
acccttggggagcaggctcaggctt

SEQ ID NO: 360433 - DNA, 25 bp, Artificial
  Probe
taactggagcagacaggaaaccctt

SEQ ID NO: 360434 - DNA, 25 bp, Artificial
  Probe
tgtaactggagcagacaggaaaccc

SEQ ID NO: 360435 - DNA, 25 bp, Artificial
  Probe
aggattgtaactggagcagacagga

SEQ ID NO: 360436 - DNA, 25 bp, Artificial
  Probe
ggagcaggctcaggcttccacagcc

SEQ ID NO: 360437 - DNA, 25 bp, Artificial
  Probe
gagccacaggattgtaactggagca

SEQ ID NO: 360438 - DNA, 25 bp, Artificial
  Probe
gctcaggcttccacagccccatccc

SEQ ID NO: 360439 - DNA, 25 bp, Artificial
  Probe
gaaacccttggggagcaggctcagg

SEQ ID NO: 360440 - DNA, 25 bp, Artificial
  Probe
cagacaggaaacccttggggagcag

SEQ ID NO: 360441 - DNA, 25 bp, Artificial
  Probe
caggctcaggcttccacagccccat

SEQ ID NO: 360442 - DNA, 25 bp, Artificial
  Probe
attgtaactggagcagacaggaaac

SEQ ID NO: 360443 - DNA, 25 bp, Artificial
  Probe
gagcaggctcaggcttccacagccc

SEQ ID NO: 360444 - DNA, 25 bp, Artificial
  Probe
ggatctttttgaagaggccgaattc

SEQ ID NO: 360445 - DNA, 25 bp, Artificial
  Probe
ttgaaccaacccaggcacagacatg

SEQ ID NO: 360446 - DNA, 25 bp, Artificial
  Probe
ctcaaggaactcactctggagagag

SEQ ID NO: 360447 - DNA, 25 bp, Artificial
  Probe
cactctggagagagggcacaggaaa

SEQ ID NO: 360448 - DNA, 25 bp, Artificial
  Probe
agggcctctcagaggcctttcagac

SEQ ID NO: 360449 - DNA, 25 bp, Artificial
  Probe
tctggctacaggaaggcaaatgttg

SEQ ID NO: 360450 - DNA, 25 bp, Artificial
  Probe
ctatgaggcgcatggtataagcaag

SEQ ID NO: 360451 - DNA, 25 bp, Artificial
  Probe
ctgggagtgcctgtggtagtaaatc

SEQ ID NO: 360452 - DNA, 25 bp, Artificial
  Probe
tcaccgaagtgacatttgaaccaac

SEQ ID NO: 360453 - DNA, 25 bp, Artificial
  Probe
tcagaaaccactaattgaagcctgg

SEQ ID NO: 360454 - DNA, 25 bp, Artificial
  Probe
aggcctttcagacatcccatagaag

SEQ ID NO: 360455 - DNA, 25 bp, Artificial
  Probe
caggtttgtattcaacgagggaatc

SEQ ID NO: 360456 - DNA, 25 bp, Artificial
  Probe
agtgcctgtggtagtaaatccaaac

SEQ ID NO: 360457 - DNA, 25 bp, Artificial
  Probe
gggaatcatttttgcctgctccctt

SEQ ID NO: 360458 - DNA, 25 bp, Artificial
  Probe
ttatcaacaggtttgtattcaacga

SEQ ID NO: 360459 - DNA, 25 bp, Artificial
  Probe
ggtcatcatcttactctcaaggaac

SEQ ID NO: 360460 - DNA, 25 bp, Artificial
  Probe
cttactctcaaggaactcactctgg

SEQ ID NO: 360461 - DNA, 25 bp, Artificial
  Probe
attcaacgagggaatcatttttgcc

SEQ ID NO: 360462 - DNA, 25 bp, Artificial
  Probe
ctggcctctttaaggcccactctgg

SEQ ID NO: 360463 - DNA, 25 bp, Artificial
  Probe
ccattataaagatttcaccgaagtg

SEQ ID NO: 360464 - DNA, 25 bp, Artificial
  Probe
agaaggcagtcacttggcctggcct

SEQ ID NO: 360465 - DNA, 25 bp, Artificial
  Probe
gtctgcagggcctctcagaggcctt

SEQ ID NO: 360466 - DNA, 25 bp, Artificial
  Probe
cacaattcctcaggagtacacctag

SEQ ID NO: 360467 - DNA, 25 bp, Artificial
  Probe
acctaggtctgcagggcctctcaga

SEQ ID NO: 360468 - DNA, 25 bp, Artificial
  Probe
gactattctatgaggcgcatggtat

SEQ ID NO: 360469 - DNA, 25 bp, Artificial
  Probe
attagcactgctccaatgttcaacg

SEQ ID NO: 360470 - DNA, 25 bp, Artificial
  Probe
gctgttaactcattagcactgctcc

SEQ ID NO: 360471 - DNA, 25 bp, Artificial
  Probe
agtgacatttgaaccaacccaggca

SEQ ID NO: 360472 - DNA, 25 bp, Artificial
  Probe
aagcaggaaagcaccatgtgatggg

SEQ ID NO: 360473 - DNA, 25 bp, Artificial
  Probe
ccaggcacagacatgtagatttgaa

SEQ ID NO: 360474 - DNA, 25 bp, Artificial
  Probe
ctaattgaagcctggctgttaactc

SEQ ID NO: 360475 - DNA, 25 bp, Artificial
  Probe
atgttcaacgggtctgggagtgcct

SEQ ID NO: 360476 - DNA, 25 bp, Artificial
  Probe
ttcagacatcccatagaaggcagtc

SEQ ID NO: 360477 - DNA, 25 bp, Artificial
  Probe
ctgctgtgattatcaagcagcaaca

SEQ ID NO: 360478 - DNA, 25 bp, Artificial
  Probe
tctttaaggcccactctggctacag

SEQ ID NO: 360479 - DNA, 25 bp, Artificial
  Probe
agagagactattctatgaggcgcat

SEQ ID NO: 360480 - DNA, 25 bp, Artificial
  Probe
gcagcaacagcaattgatatccaga

SEQ ID NO: 360481 - DNA, 25 bp, Artificial
  Probe
gtgattatcaagcagcaacagcaat

SEQ ID NO: 360482 - DNA, 25 bp, Artificial
  Probe
tgttgataggtcatcatcttactct

SEQ ID NO: 360483 - DNA, 25 bp, Artificial
  Probe
agggaatcatttttgcctgctccct

SEQ ID NO: 360484 - DNA, 25 bp, Artificial
  Probe
ctccaatgttcaacgggtctgggag

SEQ ID NO: 360485 - DNA, 25 bp, Artificial
  Probe
ctcagaggcctttcagacatcccat

SEQ ID NO: 360486 - DNA, 25 bp, Artificial
  Probe
cttctcatccccatgagctgctgtg

SEQ ID NO: 360487 - DNA, 25 bp, Artificial
  Probe
cagctgaggttatcaacaggtttgt

SEQ ID NO: 360488 - DNA, 25 bp, Artificial
  Probe
tctatgaggcgcatggtataagcaa

SEQ ID NO: 360489 - DNA, 25 bp, Artificial
  Probe
gtctcagatacagctgaggttatca

SEQ ID NO: 360490 - DNA, 25 bp, Artificial
  Probe
attccacagaagattttgtaaagac

SEQ ID NO: 360491 - DNA, 25 bp, Artificial
  Probe
aagaggagaccaatctcagcaaaat

SEQ ID NO: 360492 - DNA, 25 bp, Artificial
  Probe
atgaatttgagtatcgcccaagctt

SEQ ID NO: 360493 - DNA, 25 bp, Artificial
  Probe
acctgaagattggtgcctcaactca

SEQ ID NO: 360494 - DNA, 25 bp, Artificial
  Probe
tttggtctgagctcagggccaagga

SEQ ID NO: 360495 - DNA, 25 bp, Artificial
  Probe
ttccacagaagattttgtaaagaca

SEQ ID NO: 360496 - DNA, 25 bp, Artificial
  Probe
cccaccttcatgtatgaatttgagt

SEQ ID NO: 360497 - DNA, 25 bp, Artificial
  Probe
aagattggtgcctcaactcaggcag

SEQ ID NO: 360498 - DNA, 25 bp, Artificial
  Probe
agtcacagagatgctggagccccca

SEQ ID NO: 360499 - DNA, 25 bp, Artificial
  Probe
gcagcagaggaaccatcccactgga

SEQ ID NO: 360500 - DNA, 25 bp, Artificial
  Probe
agaagtggctttttggtctgagctc

SEQ ID NO: 360501 - DNA, 25 bp, Artificial
  Probe
agggtacctgaagattggtgcctca

SEQ ID NO: 360502 - DNA, 25 bp, Artificial
  Probe
gccccattggccagaatatgaccag

SEQ ID NO: 360503 - DNA, 25 bp, Artificial
  Probe
ccttcatgtatgaatttgagtatcg

SEQ ID NO: 360504 - DNA, 25 bp, Artificial
  Probe
gtatcagccatgaggcccaagacag

SEQ ID NO: 360505 - DNA, 25 bp, Artificial
  Probe
tttgagactataacatcacatggta

SEQ ID NO: 360506 - DNA, 25 bp, Artificial
  Probe
aatactgggccaactttgctcggaa

SEQ ID NO: 360507 - DNA, 25 bp, Artificial
  Probe
ctttgctcggaatgggagccctaat

SEQ ID NO: 360508 - DNA, 25 bp, Artificial
  Probe
tgagtatcgcccaagctttgtatca

SEQ ID NO: 360509 - DNA, 25 bp, Artificial
  Probe
gacataacacttcttgtctttgaga

SEQ ID NO: 360510 - DNA, 25 bp, Artificial
  Probe
ccactggaaacatgttgagctctga

SEQ ID NO: 360511 - DNA, 25 bp, Artificial
  Probe
catcacatggtattttgtacaaatg

SEQ ID NO: 360512 - DNA, 25 bp, Artificial
  Probe
gccaaggaggcagcagaggaaccat

SEQ ID NO: 360513 - DNA, 25 bp, Artificial
  Probe
gccatgaggcccaagacagtgatcg

SEQ ID NO: 360514 - DNA, 25 bp, Artificial
  Probe
ttggccagaatatgaccagaaggaa

SEQ ID NO: 360515 - DNA, 25 bp, Artificial
  Probe
ctcaggcagcccagaggctgaagga

SEQ ID NO: 360516 - DNA, 25 bp, Artificial
  Probe
atatgaccagaaggaagggtacctg

SEQ ID NO: 360517 - DNA, 25 bp, Artificial
  Probe
ggaaacatgttgagctctgatcagg

SEQ ID NO: 360518 - DNA, 25 bp, Artificial
  Probe
tcggagaccatggtgatgaactctt

SEQ ID NO: 360519 - DNA, 25 bp, Artificial
  Probe
agcccagaggctgaaggacaaagaa

SEQ ID NO: 360520 - DNA, 25 bp, Artificial
  Probe
atggtgatgaactcttctcagtatt

SEQ ID NO: 360521 - DNA, 25 bp, Artificial
  Probe
tgcctcagaagaggagaccaatctc

SEQ ID NO: 360522 - DNA, 25 bp, Artificial
  Probe
cccaagacagtgatcggagaccatg

SEQ ID NO: 360523 - DNA, 25 bp, Artificial
  Probe
gggctgccccattggccagaatatg

SEQ ID NO: 360524 - DNA, 25 bp, Artificial
  Probe
agacataacacttcttgtctttgag

SEQ ID NO: 360525 - DNA, 25 bp, Artificial
  Probe
ccatgtttgagaacctgaagctaaa

SEQ ID NO: 360526 - DNA, 25 bp, Artificial
  Probe
ggccaactttgctcggaatgggagc

SEQ ID NO: 360527 - DNA, 25 bp, Artificial
  Probe
ctcaactcaggcagcccagaggctg

SEQ ID NO: 360528 - DNA, 25 bp, Artificial
  Probe
gaactcttctcagtatttggatctc

SEQ ID NO: 360529 - DNA, 25 bp, Artificial
  Probe
aagatggtgcctcagaagaggagac

SEQ ID NO: 360530 - DNA, 25 bp, Artificial
  Probe
tgaatttgagtatcgcccaagcttt

SEQ ID NO: 360531 - DNA, 25 bp, Artificial
  Probe
gacagtgatcggagaccatggtgat

SEQ ID NO: 360532 - DNA, 25 bp, Artificial
  Probe
agggctgccccattggccagaatat

SEQ ID NO: 360533 - DNA, 25 bp, Artificial
  Probe
tctcagcaaaatggtgatgaaatac

SEQ ID NO: 360534 - DNA, 25 bp, Artificial
  Probe
gaatatgaccagaaggaagggtacc

SEQ ID NO: 360535 - DNA, 25 bp, Artificial
  Probe
gactataacatcacatggtattttg

SEQ ID NO: 360536 - DNA, 25 bp, Artificial
  Probe
cactaggcacccatacaagtgtagt

SEQ ID NO: 360537 - DNA, 25 bp, Artificial
  Probe
ttggcatccttaaacttctgtgtgt

SEQ ID NO: 360538 - DNA, 25 bp, Artificial
  Probe
tgcaactctacctttaggggaccca

SEQ ID NO: 360539 - DNA, 25 bp, Artificial
  Probe
caggcaaatgcaactctacctttag

SEQ ID NO: 360540 - DNA, 25 bp, Artificial
  Probe
acactgggactcaggcaaatgcaac

SEQ ID NO: 360541 - DNA, 25 bp, Artificial
  Probe
tctgtcagtggattcttgtgtttcc

SEQ ID NO: 360542 - DNA, 25 bp, Artificial
  Probe
tccactcatctgtcagtggattctt

SEQ ID NO: 360543 - DNA, 25 bp, Artificial
  Probe
atctacactgggactcaggcaaatg

SEQ ID NO: 360544 - DNA, 25 bp, Artificial
  Probe
ggcatccttaaacttctgtgtgtgt

SEQ ID NO: 360545 - DNA, 25 bp, Artificial
  Probe
acccatacaagtgtagtgagtgcac

SEQ ID NO: 360546 - DNA, 25 bp, Artificial
  Probe
tatgatttatttctggggtcacagc

SEQ ID NO: 360547 - DNA, 25 bp, Artificial
  Probe
gtctcagggggcactaggcacccat

SEQ ID NO: 360548 - DNA, 25 bp, Artificial
  Probe
ccatacaagtgtagtgagtgcacac

SEQ ID NO: 360549 - DNA, 25 bp, Artificial
  Probe
ctggggtcacagcatgaaggtcata

SEQ ID NO: 360550 - DNA, 25 bp, Artificial
  Probe
ggggcactaggcacccatacaagtg

SEQ ID NO: 360551 - DNA, 25 bp, Artificial
  Probe
ctcctatatctacactgggactcag

SEQ ID NO: 360552 - DNA, 25 bp, Artificial
  Probe
caaatgcaactctacctttagggga

SEQ ID NO: 360553 - DNA, 25 bp, Artificial
  Probe
ctgtgtgcatacttttaaagcctat

SEQ ID NO: 360554 - DNA, 25 bp, Artificial
  Probe
atgaatgatgctcctgtggtcatgg

SEQ ID NO: 360555 - DNA, 25 bp, Artificial
  Probe
aggcacccatacaagtgtagtgagt

SEQ ID NO: 360556 - DNA, 25 bp, Artificial
  Probe
acacttttactgctctaccagagga

SEQ ID NO: 360557 - DNA, 25 bp, Artificial
  Probe
tgggactcaggcaaatgcaactcta

SEQ ID NO: 360558 - DNA, 25 bp, Artificial
  Probe
ttaggggacccaatatccttttctg

SEQ ID NO: 360559 - DNA, 25 bp, Artificial
  Probe
ctcagggggcactaggcacccatac

SEQ ID NO: 360560 - DNA, 25 bp, Artificial
  Probe
ctatatctacactgggactcaggca

SEQ ID NO: 360561 - DNA, 25 bp, Artificial
  Probe
gaggttaaacacttttactgctcta

SEQ ID NO: 360562 - DNA, 25 bp, Artificial
  Probe
taaatatcatgctgtgtgcatactt

SEQ ID NO: 360563 - DNA, 25 bp, Artificial
  Probe
gctcctgtggtcatgggtttataat

SEQ ID NO: 360564 - DNA, 25 bp, Artificial
  Probe
gaatgatgctcctgtggtcatgggt

SEQ ID NO: 360565 - DNA, 25 bp, Artificial
  Probe
gactcaggcaaatgcaactctacct

SEQ ID NO: 360566 - DNA, 25 bp, Artificial
  Probe
gcatacttttaaagcctatagaggc

SEQ ID NO: 360567 - DNA, 25 bp, Artificial
  Probe
acttttaaagcctatagaggctggg

SEQ ID NO: 360568 - DNA, 25 bp, Artificial
  Probe
tatcatgctgtgtgcatacttttaa

SEQ ID NO: 360569 - DNA, 25 bp, Artificial
  Probe
actcatctgtcagtggattcttgtg

SEQ ID NO: 360570 - DNA, 25 bp, Artificial
  Probe
tgtgcatacttttaaagcctataga

SEQ ID NO: 360571 - DNA, 25 bp, Artificial
  Probe
ttatttctggggtcacagcatgaag

SEQ ID NO: 360572 - DNA, 25 bp, Artificial
  Probe
atgatttatttctggggtcacagca

SEQ ID NO: 360573 - DNA, 25 bp, Artificial
  Probe
gtcagtggattcttgtgtttcctct

SEQ ID NO: 360574 - DNA, 25 bp, Artificial
  Probe
gtcacagcatgaaggtcatatttta

SEQ ID NO: 360575 - DNA, 25 bp, Artificial
  Probe
ttttctggtctcagggggcactagg

SEQ ID NO: 360576 - DNA, 25 bp, Artificial
  Probe
tgtgtgcatacttttaaagcctata

SEQ ID NO: 360577 - DNA, 25 bp, Artificial
  Probe
agaggacccaagttccatctcctat

SEQ ID NO: 360578 - DNA, 25 bp, Artificial
  Probe
tccttggcatccttaaacttctgtg

SEQ ID NO: 360579 - DNA, 25 bp, Artificial
  Probe
caatatgaatgatgctcctgtggtc

SEQ ID NO: 360580 - DNA, 25 bp, Artificial
  Probe
aatatcatgctgtgtgcatactttt

SEQ ID NO: 360581 - DNA, 25 bp, Artificial
  Probe
ggattcttgtgtttcctctttcaac

SEQ ID NO: 360582 - DNA, 25 bp, Artificial
  Probe
ggtatcttaaggtccagtacaagcg

SEQ ID NO: 360583 - DNA, 25 bp, Artificial
  Probe
taaggtccagtacaagcgctcaaac

SEQ ID NO: 360584 - DNA, 25 bp, Artificial
  Probe
tttctgtggtctctttcttccaagc

SEQ ID NO: 360585 - DNA, 25 bp, Artificial
  Probe
cgagttacaagctatccaggccgaa

SEQ ID NO: 360586 - DNA, 25 bp, Artificial
  Probe
ttgtagttctctcctttcgggtatc

SEQ ID NO: 360587 - DNA, 25 bp, Artificial
  Probe
aggtcctggcaccagagctgcgcag

SEQ ID NO: 360588 - DNA, 25 bp, Artificial
  Probe
tcttaaggtccagtacaagcgctca

SEQ ID NO: 360589 - DNA, 25 bp, Artificial
  Probe
gcagtttgtagttctctcctttcgg

SEQ ID NO: 360590 - DNA, 25 bp, Artificial
  Probe
aatttctgtggtctctttcttccaa

SEQ ID NO: 360591 - DNA, 25 bp, Artificial
  Probe
gaggtcctggcaccagagctgcgca

SEQ ID NO: 360592 - DNA, 25 bp, Artificial
  Probe
aggcagtggccgagttacaagctat

SEQ ID NO: 360593 - DNA, 25 bp, Artificial
  Probe
ttaaggtccagtacaagcgctcaaa

SEQ ID NO: 360594 - DNA, 25 bp, Artificial
  Probe
agttacaagctatccaggccgaatt

SEQ ID NO: 360595 - DNA, 25 bp, Artificial
  Probe
agtggccgagttacaagctatccag

SEQ ID NO: 360596 - DNA, 25 bp, Artificial
  Probe
tgaggtcctggcaccagagctgcgc

SEQ ID NO: 360597 - DNA, 25 bp, Artificial
  Probe
atcccctgaggtcctggcaccagag

SEQ ID NO: 360598 - DNA, 25 bp, Artificial
  Probe
tagttctctcctttcgggtatctta

SEQ ID NO: 360599 - DNA, 25 bp, Artificial
  Probe
gagttacaagctatccaggccgaat

SEQ ID NO: 360600 - DNA, 25 bp, Artificial
  Probe
tttgtagttctctcctttcgggtat

SEQ ID NO: 360601 - DNA, 25 bp, Artificial
  Probe
cagtggccgagttacaagctatcca

SEQ ID NO: 360602 - DNA, 25 bp, Artificial
  Probe
ggcagtggccgagttacaagctatc

SEQ ID NO: 360603 - DNA, 25 bp, Artificial
  Probe
gcccggggcagtttgtagttctctc

SEQ ID NO: 360604 - DNA, 25 bp, Artificial
  Probe
gtggccgagttacaagctatccagg

SEQ ID NO: 360605 - DNA, 25 bp, Artificial
  Probe
ttcgggtatcttaaggtccagtaca

SEQ ID NO: 360606 - DNA, 25 bp, Artificial
  Probe
caagcccggggcagtttgtagttct

SEQ ID NO: 360607 - DNA, 25 bp, Artificial
  Probe
gcagtggccgagttacaagctatcc

SEQ ID NO: 360608 - DNA, 25 bp, Artificial
  Probe
gggtatcttaaggtccagtacaagc

SEQ ID NO: 360609 - DNA, 25 bp, Artificial
  Probe
gtatcttaaggtccagtacaagcgc

SEQ ID NO: 360610 - DNA, 25 bp, Artificial
  Probe
atttctgtggtctctttcttccaag

SEQ ID NO: 360611 - DNA, 25 bp, Artificial
  Probe
cagtttgtagttctctcctttcggg

SEQ ID NO: 360612 - DNA, 25 bp, Artificial
  Probe
ggtccagtacaagcgctcaaacctc

SEQ ID NO: 360613 - DNA, 25 bp, Artificial
  Probe
tgtagttctctcctttcgggtatct

SEQ ID NO: 360614 - DNA, 25 bp, Artificial
  Probe
atcttaaggtccagtacaagcgctc

SEQ ID NO: 360615 - DNA, 25 bp, Artificial
  Probe
aaggtccagtacaagcgctcaaacc

SEQ ID NO: 360616 - DNA, 25 bp, Artificial
  Probe
tctgtggtctctttcttccaagctg

SEQ ID NO: 360617 - DNA, 25 bp, Artificial
  Probe
agcccggggcagtttgtagttctct

SEQ ID NO: 360618 - DNA, 25 bp, Artificial
  Probe
cgggtatcttaaggtccagtacaag

SEQ ID NO: 360619 - DNA, 25 bp, Artificial
  Probe
ttctgtggtctctttcttccaagct

SEQ ID NO: 360620 - DNA, 25 bp, Artificial
  Probe
tcctttcgggtatcttaaggtccag

SEQ ID NO: 360621 - DNA, 25 bp, Artificial
  Probe
aggtccagtacaagcgctcaaacct

SEQ ID NO: 360622 - DNA, 25 bp, Artificial
  Probe
gtagttctctcctttcgggtatctt

SEQ ID NO: 360623 - DNA, 25 bp, Artificial
  Probe
ccgagttacaagctatccaggccga

SEQ ID NO: 360624 - DNA, 25 bp, Artificial
  Probe
tcgggtatcttaaggtccagtacaa

SEQ ID NO: 360625 - DNA, 25 bp, Artificial
  Probe
tatcttaaggtccagtacaagcgct

SEQ ID NO: 360626 - DNA, 25 bp, Artificial
  Probe
cttaaggtccagtacaagcgctcaa

SEQ ID NO: 360627 - DNA, 25 bp, Artificial
  Probe
gttacaagctatccaggccgaattc

SEQ ID NO: 360628 - DNA, 25 bp, Artificial
  Probe
gtcgagtagtttgcagccaggaaaa

SEQ ID NO: 360629 - DNA, 25 bp, Artificial
  Probe
tgagcagtactgtcgagtagtttgc

SEQ ID NO: 360630 - DNA, 25 bp, Artificial
  Probe
tttgcagccaggaaaagctggacac

SEQ ID NO: 360631 - DNA, 25 bp, Artificial
  Probe
ggtctcatttcagaaactaaatgtc

SEQ ID NO: 360632 - DNA, 25 bp, Artificial
  Probe
gtttgccaacctttgtcttcattgt

SEQ ID NO: 360633 - DNA, 25 bp, Artificial
  Probe
ttgtcttcattgttcaatattttta

SEQ ID NO: 360634 - DNA, 25 bp, Artificial
  Probe
agcagtactgtcgagtagtttgcag

SEQ ID NO: 360635 - DNA, 25 bp, Artificial
  Probe
agatatattcagatatgctgaccct

SEQ ID NO: 360636 - DNA, 25 bp, Artificial
  Probe
ctgtcgagtagtttgcagccaggaa

SEQ ID NO: 360637 - DNA, 25 bp, Artificial
  Probe
aatatttttaattgtcactgtgaat

SEQ ID NO: 360638 - DNA, 25 bp, Artificial
  Probe
tgagtttgccaacctttgtcttcat

SEQ ID NO: 360639 - DNA, 25 bp, Artificial
  Probe
gtgaataacattttccacaaagcag

SEQ ID NO: 360640 - DNA, 25 bp, Artificial
  Probe
tcgagtagtttgcagccaggaaaag

SEQ ID NO: 360641 - DNA, 25 bp, Artificial
  Probe
attcagatatgctgacccttctaag

SEQ ID NO: 360642 - DNA, 25 bp, Artificial
  Probe
ctggacactgtaattggttattttc

SEQ ID NO: 360643 - DNA, 25 bp, Artificial
  Probe
tagtttgcagccaggaaaagctgga

SEQ ID NO: 360644 - DNA, 25 bp, Artificial
  Probe
cgagtagtttgcagccaggaaaagc

SEQ ID NO: 360645 - DNA, 25 bp, Artificial
  Probe
tccacaaagcagatatattcagata

SEQ ID NO: 360646 - DNA, 25 bp, Artificial
  Probe
tattactcttcaaaattaaatttag

SEQ ID NO: 360647 - DNA, 25 bp, Artificial
  Probe
tcagatatgctgacccttctaagct

SEQ ID NO: 360648 - DNA, 25 bp, Artificial
  Probe
agtttgcagccaggaaaagctggac

SEQ ID NO: 360649 - DNA, 25 bp, Artificial
  Probe
aatatgaattttctgtatagtaaaa

SEQ ID NO: 360650 - DNA, 25 bp, Artificial
  Probe
tatgaattttctgtatagtaaaatt

SEQ ID NO: 360651 - DNA, 25 bp, Artificial
  Probe
aatgagtttgccaacctttgtcttc

SEQ ID NO: 360652 - DNA, 25 bp, Artificial
  Probe
aataataacaataatatcagcattt

SEQ ID NO: 360653 - DNA, 25 bp, Artificial
  Probe
ttgcagccaggaaaagctggacact

SEQ ID NO: 360654 - DNA, 25 bp, Artificial
  Probe
agtttgccaacctttgtcttcattg

SEQ ID NO: 360655 - DNA, 25 bp, Artificial
  Probe
gatatattcagatatgctgaccctt

SEQ ID NO: 360656 - DNA, 25 bp, Artificial
  Probe
cgcttacagaacacaaattattgtg

SEQ ID NO: 360657 - DNA, 25 bp, Artificial
  Probe
tactgtcgagtagtttgcagccagg

SEQ ID NO: 360658 - DNA, 25 bp, Artificial
  Probe
gagtttgccaacctttgtcttcatt

SEQ ID NO: 360659 - DNA, 25 bp, Artificial
  Probe
gcagtactgtcgagtagtttgcagc

SEQ ID NO: 360660 - DNA, 25 bp, Artificial
  Probe
tgcagccaggaaaagctggacactg

SEQ ID NO: 360661 - DNA, 25 bp, Artificial
  Probe
aaacaataatattactcttcaaaat

SEQ ID NO: 360662 - DNA, 25 bp, Artificial
  Probe
agtactgtcgagtagtttgcagcca

SEQ ID NO: 360663 - DNA, 25 bp, Artificial
  Probe
cagcatttatgtggataaggtagat

SEQ ID NO: 360664 - DNA, 25 bp, Artificial
  Probe
actgtcgagtagtttgcagccagga

SEQ ID NO: 360665 - DNA, 25 bp, Artificial
  Probe
ttcagatatgctgacccttctaagc

SEQ ID NO: 360666 - DNA, 25 bp, Artificial
  Probe
atgagtttgccaacctttgtcttca

SEQ ID NO: 360667 - DNA, 25 bp, Artificial
  Probe
gtgagcagtactgtcgagtagtttg

SEQ ID NO: 360668 - DNA, 25 bp, Artificial
  Probe
cagtactgtcgagtagtttgcagcc

SEQ ID NO: 360669 - DNA, 25 bp, Artificial
  Probe
gtttgcagccaggaaaagctggaca

SEQ ID NO: 360670 - DNA, 25 bp, Artificial
  Probe
gtactgtcgagtagtttgcagccag

SEQ ID NO: 360671 - DNA, 25 bp, Artificial
  Probe
gcttacagaacacaaattattgtgt

SEQ ID NO: 360672 - DNA, 25 bp, Artificial
  Probe
gagcagtactgtcgagtagtttgca

SEQ ID NO: 360673 - DNA, 25 bp, Artificial
  Probe
attcaaaatgagtttgccaaccttt

SEQ ID NO: 360674 - DNA, 25 bp, Artificial
  Probe
tcccatggctattgaagaacaggtg

SEQ ID NO: 360675 - DNA, 25 bp, Artificial
  Probe
tatcaggtctgatgggaaaatctca

SEQ ID NO: 360676 - DNA, 25 bp, Artificial
  Probe
acttgtggaggtcagagagcagcct

SEQ ID NO: 360677 - DNA, 25 bp, Artificial
  Probe
cagagagcagcctgtaggagtcagt

SEQ ID NO: 360678 - DNA, 25 bp, Artificial
  Probe
tatcctgggacttgtggaggtcaga

SEQ ID NO: 360679 - DNA, 25 bp, Artificial
  Probe
agcaccatttgtaaaggtttactct

SEQ ID NO: 360680 - DNA, 25 bp, Artificial
  Probe
accagagcctcttgggcaatatcag

SEQ ID NO: 360681 - DNA, 25 bp, Artificial
  Probe
taaaggtttactcttgtactccctg

SEQ ID NO: 360682 - DNA, 25 bp, Artificial
  Probe
tcttggctgggtttgaaccttaaag

SEQ ID NO: 360683 - DNA, 25 bp, Artificial
  Probe
cagtcggatgcaaagctgaaggaaa

SEQ ID NO: 360684 - DNA, 25 bp, Artificial
  Probe
ctccctgatgtacagaaatcacatg

SEQ ID NO: 360685 - DNA, 25 bp, Artificial
  Probe
ttgtactccctgatgtacagaaatc

SEQ ID NO: 360686 - DNA, 25 bp, Artificial
  Probe
cttgggcaatatcaggtctgatggg

SEQ ID NO: 360687 - DNA, 25 bp, Artificial
  Probe
tatttaaagctcgacttcaggggtt

SEQ ID NO: 360688 - DNA, 25 bp, Artificial
  Probe
gacgggctcagatgtatcctgggac

SEQ ID NO: 360689 - DNA, 25 bp, Artificial
  Probe
tttgaaccttaaagccctgccactg

SEQ ID NO: 360690 - DNA, 25 bp, Artificial
  Probe
atgttgtgagccagcaccagagcct

SEQ ID NO: 360691 - DNA, 25 bp, Artificial
  Probe
agaacaggtggctgtcatctatgca

SEQ ID NO: 360692 - DNA, 25 bp, Artificial
  Probe
attgaagaacaggtggctgtcatct

SEQ ID NO: 360693 - DNA, 25 bp, Artificial
  Probe
gtaagatcacaaagttcgagagtgc

SEQ ID NO: 360694 - DNA, 25 bp, Artificial
  Probe
aaactggagcccagtaagatcacaa

SEQ ID NO: 360695 - DNA, 25 bp, Artificial
  Probe
agccagcaccagagcctcttgggca

SEQ ID NO: 360696 - DNA, 25 bp, Artificial
  Probe
agcctcttgggcaatatcaggtctg

SEQ ID NO: 360697 - DNA, 25 bp, Artificial
  Probe
tccctgatgtacagaaatcacatga

SEQ ID NO: 360698 - DNA, 25 bp, Artificial
  Probe
tgtaggagtcagtgccctcctttcc

SEQ ID NO: 360699 - DNA, 25 bp, Artificial
  Probe
taacaaacttcttggctgggtttga

SEQ ID NO: 360700 - DNA, 25 bp, Artificial
  Probe
ggaaatcgtaacaaacttcttggct

SEQ ID NO: 360701 - DNA, 25 bp, Artificial
  Probe
tattgaagaacaggtggctgtcatc

SEQ ID NO: 360702 - DNA, 25 bp, Artificial
  Probe
gacactgctttggttttgtcattta

SEQ ID NO: 360703 - DNA, 25 bp, Artificial
  Probe
ggaaaatctcagaacagtcggatgc

SEQ ID NO: 360704 - DNA, 25 bp, Artificial
  Probe
gtccggggttatcttgataaactgg

SEQ ID NO: 360705 - DNA, 25 bp, Artificial
  Probe
gagtcagtgccctcctttccctggg

SEQ ID NO: 360706 - DNA, 25 bp, Artificial
  Probe
atgtatcctgggacttgtggaggtc

SEQ ID NO: 360707 - DNA, 25 bp, Artificial
  Probe
gttatcttgataaactggagcccag

SEQ ID NO: 360708 - DNA, 25 bp, Artificial
  Probe
gtttgaaccttaaagccctgccact

SEQ ID NO: 360709 - DNA, 25 bp, Artificial
  Probe
gcgtccggggttatcttgataaact

SEQ ID NO: 360710 - DNA, 25 bp, Artificial
  Probe
tctatgcaggcgtccggggttatct

SEQ ID NO: 360711 - DNA, 25 bp, Artificial
  Probe
cccagtaagatcacaaagttcgaga

SEQ ID NO: 360712 - DNA, 25 bp, Artificial
  Probe
gtttactcttgtactccctgatgta

SEQ ID NO: 360713 - DNA, 25 bp, Artificial
  Probe
tggtaaaatcagcaccatttgtaaa

SEQ ID NO: 360714 - DNA, 25 bp, Artificial
  Probe
cagaacagtcggatgcaaagctgaa

SEQ ID NO: 360715 - DNA, 25 bp, Artificial
  Probe
tgccactgtcaccagacactgcttt

SEQ ID NO: 360716 - DNA, 25 bp, Artificial
  Probe
caatatcaggtctgatgggaaaatc

SEQ ID NO: 360717 - DNA, 25 bp, Artificial
  Probe
agtactctcccatggctattgaaga

SEQ ID NO: 360718 - DNA, 25 bp, Artificial
  Probe
ttgataaactggagcccagtaagat

SEQ ID NO: 360719 - DNA, 25 bp, Artificial
  Probe
tgtcatctatgcaggcgtccggggt

SEQ ID NO: 360720 - DNA, 25 bp, Artificial
  Probe
aaaggcctgccctgtcccaggtgtg

SEQ ID NO: 360721 - DNA, 25 bp, Artificial
  Probe
acagtactgcagaggaaaagctatg

SEQ ID NO: 360722 - DNA, 25 bp, Artificial
  Probe
ccccatgccctgaggctggtactat

SEQ ID NO: 360723 - DNA, 25 bp, Artificial
  Probe
cagtcctaggtgagcccacagtact

SEQ ID NO: 360724 - DNA, 25 bp, Artificial
  Probe
acatagagccaaaggcctgccctgt

SEQ ID NO: 360725 - DNA, 25 bp, Artificial
  Probe
cagttgtgacacatgcttttaaccc

SEQ ID NO: 360726 - DNA, 25 bp, Artificial
  Probe
tgaccttgaccttactacatagcag

SEQ ID NO: 360727 - DNA, 25 bp, Artificial
  Probe
tccaggctgaccttgaccttactac

SEQ ID NO: 360728 - DNA, 25 bp, Artificial
  Probe
catttggttgtttctaaggcagtcg

SEQ ID NO: 360729 - DNA, 25 bp, Artificial
  Probe
gaccccatgccctgaggctggtact

SEQ ID NO: 360730 - DNA, 25 bp, Artificial
  Probe
agccccagacagacagacacagtct

SEQ ID NO: 360731 - DNA, 25 bp, Artificial
  Probe
ggctagcggccacagtcatggagtc

SEQ ID NO: 360732 - DNA, 25 bp, Artificial
  Probe
agtcatggagtcaagactgaacata

SEQ ID NO: 360733 - DNA, 25 bp, Artificial
  Probe
cgtcttggggcaacttggtgagacc

SEQ ID NO: 360734 - DNA, 25 bp, Artificial
  Probe
ggtgagaccctgtctcgatattaaa

SEQ ID NO: 360735 - DNA, 25 bp, Artificial
  Probe
aaggaaattcccacgcgcagcctca

SEQ ID NO: 360736 - DNA, 25 bp, Artificial
  Probe
atctcagatctaaggcaggagtgga

SEQ ID NO: 360737 - DNA, 25 bp, Artificial
  Probe
gaggagccccagacagacagacaca

SEQ ID NO: 360738 - DNA, 25 bp, Artificial
  Probe
tcctgactttagacggtaagtcatt

SEQ ID NO: 360739 - DNA, 25 bp, Artificial
  Probe
tcatttggttgtttctaaggcagtc

SEQ ID NO: 360740 - DNA, 25 bp, Artificial
  Probe
ttgaccttactacatagcagaaagc

SEQ ID NO: 360741 - DNA, 25 bp, Artificial
  Probe
atgccctgaggctggtactatctca

SEQ ID NO: 360742 - DNA, 25 bp, Artificial
  Probe
ctaggtgagcccacagtactgcaga

SEQ ID NO: 360743 - DNA, 25 bp, Artificial
  Probe
agtcaagactgaacatagagccaaa

SEQ ID NO: 360744 - DNA, 25 bp, Artificial
  Probe
ggaggagccccagacagacagacac

SEQ ID NO: 360745 - DNA, 25 bp, Artificial
  Probe
agctatggggagaccccatgccctg

SEQ ID NO: 360746 - DNA, 25 bp, Artificial
  Probe
gcctcatgggctagcggccacagtc

SEQ ID NO: 360747 - DNA, 25 bp, Artificial
  Probe
caggtgagctttcagaaggaaattc

SEQ ID NO: 360748 - DNA, 25 bp, Artificial
  Probe
atagcagaaagctggcattgaactc

SEQ ID NO: 360749 - DNA, 25 bp, Artificial
  Probe
aaagctatggggagaccccatgccc

SEQ ID NO: 360750 - DNA, 25 bp, Artificial
  Probe
aagactgaacatagagccaaaggcc

SEQ ID NO: 360751 - DNA, 25 bp, Artificial
  Probe
gactgaacatagagccaaaggcctg

SEQ ID NO: 360752 - DNA, 25 bp, Artificial
  Probe
ttggtgagaccctgtctcgatatta

SEQ ID NO: 360753 - DNA, 25 bp, Artificial
  Probe
ccttctagggtagagagctagggta

SEQ ID NO: 360754 - DNA, 25 bp, Artificial
  Probe
caacttggtgagaccctgtctcgat

SEQ ID NO: 360755 - DNA, 25 bp, Artificial
  Probe
gagtttcaggccttctagggtagag

SEQ ID NO: 360756 - DNA, 25 bp, Artificial
  Probe
tgtttctaaggcagtcgtttagtcc

SEQ ID NO: 360757 - DNA, 25 bp, Artificial
  Probe
cagacagacacagtctgagaaagca

SEQ ID NO: 360758 - DNA, 25 bp, Artificial
  Probe
tggggagaccccatgccctgaggct

SEQ ID NO: 360759 - DNA, 25 bp, Artificial
  Probe
cagacacagtctgagaaagcaagtg

SEQ ID NO: 360760 - DNA, 25 bp, Artificial
  Probe
agcaagtgtagttcctgactttaga

SEQ ID NO: 360761 - DNA, 25 bp, Artificial
  Probe
gacagttgtgacacatgcttttaac

SEQ ID NO: 360762 - DNA, 25 bp, Artificial
  Probe
ttcaggccttctagggtagagagct

SEQ ID NO: 360763 - DNA, 25 bp, Artificial
  Probe
gcagtcgtttagtccaggctgacct

SEQ ID NO: 360764 - DNA, 25 bp, Artificial
  Probe
tatagttcagaaacagtcctaggtg

SEQ ID NO: 360765 - DNA, 25 bp, Artificial
  Probe
acacagtctgagaaagcaagtgtag

SEQ ID NO: 360766 - DNA, 25 bp, Artificial
  Probe
agtagcagcagacttaacgctggga

SEQ ID NO: 360767 - DNA, 25 bp, Artificial
  Probe
gatagctggtagcttacatgcacag

SEQ ID NO: 360768 - DNA, 25 bp, Artificial
  Probe
agtattatttctcagtagcagcaga

SEQ ID NO: 360769 - DNA, 25 bp, Artificial
  Probe
tttcagagccatcacttgttcatgt

SEQ ID NO: 360770 - DNA, 25 bp, Artificial
  Probe
gtattatttctcagtagcagcagac

SEQ ID NO: 360771 - DNA, 25 bp, Artificial
  Probe
gttcccgcagagagattattgggat

SEQ ID NO: 360772 - DNA, 25 bp, Artificial
  Probe
ggctaaatctttaatctttaacagg

SEQ ID NO: 360773 - DNA, 25 bp, Artificial
  Probe
tcccgcagagagattattgggatcg

SEQ ID NO: 360774 - DNA, 25 bp, Artificial
  Probe
tttacaggatagctggtagcttaca

SEQ ID NO: 360775 - DNA, 25 bp, Artificial
  Probe
cttgttcatgtaagagttggtaacc

SEQ ID NO: 360776 - DNA, 25 bp, Artificial
  Probe
caggtttgtggttcccgcagagaga

SEQ ID NO: 360777 - DNA, 25 bp, Artificial
  Probe
taacaggtttgtggttcccgcagag

SEQ ID NO: 360778 - DNA, 25 bp, Artificial
  Probe
ttatcttttgaaagaccaaaggctc

SEQ ID NO: 360779 - DNA, 25 bp, Artificial
  Probe
ctggttttacctactttgttgcaag

SEQ ID NO: 360780 - DNA, 25 bp, Artificial
  Probe
agtcagctcttgcagtactttacct

SEQ ID NO: 360781 - DNA, 25 bp, Artificial
  Probe
catcacttgttcatgtaagagttgg

SEQ ID NO: 360782 - DNA, 25 bp, Artificial
  Probe
gcagcagacttaacgctgggattgg

SEQ ID NO: 360783 - DNA, 25 bp, Artificial
  Probe
tttatagtcagctcttgcagtactt

SEQ ID NO: 360784 - DNA, 25 bp, Artificial
  Probe
cccgcagagagattattgggatcgt

SEQ ID NO: 360785 - DNA, 25 bp, Artificial
  Probe
accagtgagcgaacgttttatcttt

SEQ ID NO: 360786 - DNA, 25 bp, Artificial
  Probe
tttttatagtcagctcttgcagtac

SEQ ID NO: 360787 - DNA, 25 bp, Artificial
  Probe
tttaacaggtttgtggttcccgcag

SEQ ID NO: 360788 - DNA, 25 bp, Artificial
  Probe
tcagctcttgcagtactttacctag

SEQ ID NO: 360789 - DNA, 25 bp, Artificial
  Probe
agagccatcacttgttcatgtaaga

SEQ ID NO: 360790 - DNA, 25 bp, Artificial
  Probe
tagcgtttacaggatagctggtagc

SEQ ID NO: 360791 - DNA, 25 bp, Artificial
  Probe
tttctcagtagcagcagacttaacg

SEQ ID NO: 360792 - DNA, 25 bp, Artificial
  Probe
tgtggttcccgcagagagattattg

SEQ ID NO: 360793 - DNA, 25 bp, Artificial
  Probe
tagctggtagcttacatgcacagcg

SEQ ID NO: 360794 - DNA, 25 bp, Artificial
  Probe
tacatagcgtttacaggatagctgg

SEQ ID NO: 360795 - DNA, 25 bp, Artificial
  Probe
aagtacatagcgtttacaggatagc

SEQ ID NO: 360796 - DNA, 25 bp, Artificial
  Probe
ttctcagtagcagcagacttaacgc

SEQ ID NO: 360797 - DNA, 25 bp, Artificial
  Probe
aacaggtttgtggttcccgcagaga

SEQ ID NO: 360798 - DNA, 25 bp, Artificial
  Probe
catagcgtttacaggatagctggta

SEQ ID NO: 360799 - DNA, 25 bp, Artificial
  Probe
tggttttacctactttgttgcaagc

SEQ ID NO: 360800 - DNA, 25 bp, Artificial
  Probe
ctagtattatttctcagtagcagca

SEQ ID NO: 360801 - DNA, 25 bp, Artificial
  Probe
cagacttaacgctgggattgggaga

SEQ ID NO: 360802 - DNA, 25 bp, Artificial
  Probe
gtcagctcttgcagtactttaccta

SEQ ID NO: 360803 - DNA, 25 bp, Artificial
  Probe
acctagtattatttctcagtagcag

SEQ ID NO: 360804 - DNA, 25 bp, Artificial
  Probe
atcttttgaaagaccaaaggctctt

SEQ ID NO: 360805 - DNA, 25 bp, Artificial
  Probe
gccatcacttgttcatgtaagagtt

SEQ ID NO: 360806 - DNA, 25 bp, Artificial
  Probe
gctcttgcagtactttacctagtat

SEQ ID NO: 360807 - DNA, 25 bp, Artificial
  Probe
cagtagcagcagacttaacgctggg

SEQ ID NO: 360808 - DNA, 25 bp, Artificial
  Probe
agcgtttacaggatagctggtagct

SEQ ID NO: 360809 - DNA, 25 bp, Artificial
  Probe
tcttttgaaagaccaaaggctcttt

SEQ ID NO: 360810 - DNA, 25 bp, Artificial
  Probe
agtacatagcgtttacaggatagct

SEQ ID NO: 360811 - DNA, 25 bp, Artificial
  Probe
ttttcagagccatcacttgttcatg

SEQ ID NO: 360812 - DNA, 25 bp, Artificial
  Probe
ctcccgcacttgtgacagcagctaa

SEQ ID NO: 360813 - DNA, 25 bp, Artificial
  Probe
tctcctgaacaggtataatcaatga

SEQ ID NO: 360814 - DNA, 25 bp, Artificial
  Probe
aagtcccgctctttcagagcaggtt

SEQ ID NO: 360815 - DNA, 25 bp, Artificial
  Probe
tcgccaagggaactacgcagagcga

SEQ ID NO: 360816 - DNA, 25 bp, Artificial
  Probe
gcacttgtgacagcagctaacagat

SEQ ID NO: 360817 - DNA, 25 bp, Artificial
  Probe
catgacaatttttctcctgaacagg

SEQ ID NO: 360818 - DNA, 25 bp, Artificial
  Probe
ttgccattagactataaataggcgt

SEQ ID NO: 360819 - DNA, 25 bp, Artificial
  Probe
ttttgaagaatcatgtctggccgtg

SEQ ID NO: 360820 - DNA, 25 bp, Artificial
  Probe
catgtctggccgtgcaaagcagggt

SEQ ID NO: 360821 - DNA, 25 bp, Artificial
  Probe
tgaagaatcatgtctggccgtgcaa

SEQ ID NO: 360822 - DNA, 25 bp, Artificial
  Probe
gctccttcgccaagggaactacgca

SEQ ID NO: 360823 - DNA, 25 bp, Artificial
  Probe
tcagagcaggtttgcagtttcctgt

SEQ ID NO: 360824 - DNA, 25 bp, Artificial
  Probe
gccaagggaactacgcagagcgaat

SEQ ID NO: 360825 - DNA, 25 bp, Artificial
  Probe
cgccaagggaactacgcagagcgaa

SEQ ID NO: 360826 - DNA, 25 bp, Artificial
  Probe
tttcgttttcacgaaaagttgtgca

SEQ ID NO: 360827 - DNA, 25 bp, Artificial
  Probe
ttcacgaaaagttgtgcatgacaat

SEQ ID NO: 360828 - DNA, 25 bp, Artificial
  Probe
ccgctctttcagagcaggtttgcag

SEQ ID NO: 360829 - DNA, 25 bp, Artificial
  Probe
gcatgacaatttttctcctgaacag

SEQ ID NO: 360830 - DNA, 25 bp, Artificial
  Probe
tccgctacggctttatggcttttga

SEQ ID NO: 360831 - DNA, 25 bp, Artificial
  Probe
tggcacaccagtgtacttggcggcc

SEQ ID NO: 360832 - DNA, 25 bp, Artificial
  Probe
ctttcagagcaggtttgcagtttcc

SEQ ID NO: 360833 - DNA, 25 bp, Artificial
  Probe
ttctcctgaacaggtataatcaatg

SEQ ID NO: 360834 - DNA, 25 bp, Artificial
  Probe
gactcccgcacttgtgacagcagct

SEQ ID NO: 360835 - DNA, 25 bp, Artificial
  Probe
cggctttatggcttttgaagaatca

SEQ ID NO: 360836 - DNA, 25 bp, Artificial
  Probe
gaagaatcatgtctggccgtgcaaa

SEQ ID NO: 360837 - DNA, 25 bp, Artificial
  Probe
gctggcacaccagtgtacttggcgg

SEQ ID NO: 360838 - DNA, 25 bp, Artificial
  Probe
accacaagtcccagaccaagtgact

SEQ ID NO: 360839 - DNA, 25 bp, Artificial
  Probe
tcagagccacctttcgttttcacga

SEQ ID NO: 360840 - DNA, 25 bp, Artificial
  Probe
gggctggcacaccagtgtacttggc

SEQ ID NO: 360841 - DNA, 25 bp, Artificial
  Probe
tgtgggacgtgtgcaccggctcctt

SEQ ID NO: 360842 - DNA, 25 bp, Artificial
  Probe
ttttcacgaaaagttgtgcatgaca

SEQ ID NO: 360843 - DNA, 25 bp, Artificial
  Probe
taaataggcgtggacgcactacctc

SEQ ID NO: 360844 - DNA, 25 bp, Artificial
  Probe
cagaccaagtgactcccgcacttgt

SEQ ID NO: 360845 - DNA, 25 bp, Artificial
  Probe
gctacggctttatggcttttgaaga

SEQ ID NO: 360846 - DNA, 25 bp, Artificial
  Probe
agaccaagtgactcccgcacttgtg

SEQ ID NO: 360847 - DNA, 25 bp, Artificial
  Probe
cttgtgacagcagctaacagattaa

SEQ ID NO: 360848 - DNA, 25 bp, Artificial
  Probe
gctctttcagagcaggtttgcagtt

SEQ ID NO: 360849 - DNA, 25 bp, Artificial
  Probe
gccaagtcccgctctttcagagcag

SEQ ID NO: 360850 - DNA, 25 bp, Artificial
  Probe
tataaataggcgtggacgcactacc

SEQ ID NO: 360851 - DNA, 25 bp, Artificial
  Probe
aggcgtggacgcactacctccgcta

SEQ ID NO: 360852 - DNA, 25 bp, Artificial
  Probe
agtgactcccgcacttgtgacagca

SEQ ID NO: 360853 - DNA, 25 bp, Artificial
  Probe
tcgttttcacgaaaagttgtgcatg

SEQ ID NO: 360854 - DNA, 25 bp, Artificial
  Probe
ttcgttttcacgaaaagttgtgcat

SEQ ID NO: 360855 - DNA, 25 bp, Artificial
  Probe
gacaatttttctcctgaacaggtat

SEQ ID NO: 360856 - DNA, 25 bp, Artificial
  Probe
ttcagagccacctttcgttttcacg

SEQ ID NO: 360857 - DNA, 25 bp, Artificial
  Probe
ctccgctacggctttatggcttttg

SEQ ID NO: 360858 - DNA, 25 bp, Artificial
  Probe
aacttgctcttggacaggaatcaag

SEQ ID NO: 360859 - DNA, 25 bp, Artificial
  Probe
ctcctaacttgctcttggacaggaa

SEQ ID NO: 360860 - DNA, 25 bp, Artificial
  Probe
tgtttgctcctaacttgctcttgga

SEQ ID NO: 360861 - DNA, 25 bp, Artificial
  Probe
ctcttggacaggaatcaaggtaaat

SEQ ID NO: 360862 - DNA, 25 bp, Artificial
  Probe
tcctgtttgctcctaacttgctctt

SEQ ID NO: 360863 - DNA, 25 bp, Artificial
  Probe
ttgctcttggacaggaatcaaggta

SEQ ID NO: 360864 - DNA, 25 bp, Artificial
  Probe
cctaacttgctcttggacaggaatc

SEQ ID NO: 360865 - DNA, 25 bp, Artificial
  Probe
ggaagctcctgtttgctcctaactt

SEQ ID NO: 360866 - DNA, 25 bp, Artificial
  Probe
acttgctcttggacaggaatcaagg

SEQ ID NO: 360867 - DNA, 25 bp, Artificial
  Probe
ctaacttgctcttggacaggaatca

SEQ ID NO: 360868 - DNA, 25 bp, Artificial
  Probe
gctcttggacaggaatcaaggtaaa

SEQ ID NO: 360869 - DNA, 25 bp, Artificial
  Probe
gctcctgtttgctcctaacttgctc

SEQ ID NO: 360870 - DNA, 25 bp, Artificial
  Probe
atgtgtagaaggcatggtggagatc

SEQ ID NO: 360871 - DNA, 25 bp, Artificial
  Probe
gtttgctcctaacttgctcttggac

SEQ ID NO: 360872 - DNA, 25 bp, Artificial
  Probe
ctgtttgctcctaacttgctcttgg

SEQ ID NO: 360873 - DNA, 25 bp, Artificial
  Probe
tcctaacttgctcttggacaggaat

SEQ ID NO: 360874 - DNA, 25 bp, Artificial
  Probe
aagctcctgtttgctcctaacttgc

SEQ ID NO: 360875 - DNA, 25 bp, Artificial
  Probe
cttgctcttggacaggaatcaaggt

SEQ ID NO: 360876 - DNA, 25 bp, Artificial
  Probe
gctcctaacttgctcttggacagga

SEQ ID NO: 360877 - DNA, 25 bp, Artificial
  Probe
cctgtttgctcctaacttgctcttg

SEQ ID NO: 360878 - DNA, 25 bp, Artificial
  Probe
agctcctgtttgctcctaacttgct

SEQ ID NO: 360879 - DNA, 25 bp, Artificial
  Probe
cccggggaagctcctgtttgctcct

SEQ ID NO: 360880 - DNA, 25 bp, Artificial
  Probe
gggaagctcctgtttgctcctaact

SEQ ID NO: 360881 - DNA, 25 bp, Artificial
  Probe
ctcctgtttgctcctaacttgctct

SEQ ID NO: 360882 - DNA, 25 bp, Artificial
  Probe
taacttgctcttggacaggaatcaa

SEQ ID NO: 360883 - DNA, 25 bp, Artificial
  Probe
tgtagaaggcatggtggagatcttt

SEQ ID NO: 360884 - DNA, 25 bp, Artificial
  Probe
tttgctcctaacttgctcttggaca

SEQ ID NO: 360885 - DNA, 25 bp, Artificial
  Probe
tgtgtagaaggcatggtggagatct

SEQ ID NO: 360886 - DNA, 25 bp, Artificial
  Probe
ggggaagctcctgtttgctcctaac

SEQ ID NO: 360887 - DNA, 25 bp, Artificial
  Probe
cggggaagctcctgtttgctcctaa

SEQ ID NO: 360888 - DNA, 25 bp, Artificial
  Probe
tgctcttggacaggaatcaaggtaa

SEQ ID NO: 360889 - DNA, 25 bp, Artificial
  Probe
ccggggaagctcctgtttgctccta

SEQ ID NO: 360890 - DNA, 25 bp, Artificial
  Probe
tgctcctaacttgctcttggacagg

SEQ ID NO: 360891 - DNA, 25 bp, Artificial
  Probe
ttgctcctaacttgctcttggacag

SEQ ID NO: 360892 - DNA, 25 bp, Artificial
  Probe
atcatgtttgtgtcatcagcgaaag

SEQ ID NO: 360893 - DNA, 25 bp, Artificial
  Probe
tgtgtcatcagcgaaagtggaaaag

SEQ ID NO: 360894 - DNA, 25 bp, Artificial
  Probe
ggatatgcccttgactataatgagc

SEQ ID NO: 360895 - DNA, 25 bp, Artificial
  Probe
tgcccttgactataatgagcacttc

SEQ ID NO: 360896 - DNA, 25 bp, Artificial
  Probe
ttgaatcatgtttgtgtcatcagcg

SEQ ID NO: 360897 - DNA, 25 bp, Artificial
  Probe
gaatcatgtttgtgtcatcagcgaa

SEQ ID NO: 360898 - DNA, 25 bp, Artificial
  Probe
cccttgactataatgagcacttcag

SEQ ID NO: 360899 - DNA, 25 bp, Artificial
  Probe
agcctaaaagacagcggcaagttga

SEQ ID NO: 360900 - DNA, 25 bp, Artificial
  Probe
tttgaatcatgtttgtgtcatcagc

SEQ ID NO: 360901 - DNA, 25 bp, Artificial
  Probe
actataatgagcacttcagggattt

SEQ ID NO: 360902 - DNA, 25 bp, Artificial
  Probe
tgttgttggatatgcccttgactat

SEQ ID NO: 360903 - DNA, 25 bp, Artificial
  Probe
taaacatgtttcagcatgtttcagc

SEQ ID NO: 360904 - DNA, 25 bp, Artificial
  Probe
atatgcccttgactataatgagcac

SEQ ID NO: 360905 - DNA, 25 bp, Artificial
  Probe
tggatatgcccttgactataatgag

SEQ ID NO: 360906 - DNA, 25 bp, Artificial
  Probe
catgtttgtgtcatcagcgaaagtg

SEQ ID NO: 360907 - DNA, 25 bp, Artificial
  Probe
tgaatcatgtttgtgtcatcagcga

SEQ ID NO: 360908 - DNA, 25 bp, Artificial
  Probe
ttggatatgcccttgactataatga

SEQ ID NO: 360909 - DNA, 25 bp, Artificial
  Probe
gtgtcatcagcgaaagtggaaaagc

SEQ ID NO: 360910 - DNA, 25 bp, Artificial
  Probe
agacagcggcaagttgaatctacaa

SEQ ID NO: 360911 - DNA, 25 bp, Artificial
  Probe
cacttcagggatttgaatcatgttt

SEQ ID NO: 360912 - DNA, 25 bp, Artificial
  Probe
gactataatgagcacttcagggatt

SEQ ID NO: 360913 - DNA, 25 bp, Artificial
  Probe
caaagcctaaaagacagcggcaagt

SEQ ID NO: 360914 - DNA, 25 bp, Artificial
  Probe
aagcctaaaagacagcggcaagttg

SEQ ID NO: 360915 - DNA, 25 bp, Artificial
  Probe
tgactataatgagcacttcagggat

SEQ ID NO: 360916 - DNA, 25 bp, Artificial
  Probe
aaagacagcggcaagttgaatctac

SEQ ID NO: 360917 - DNA, 25 bp, Artificial
  Probe
agtacaaagcctaaaagacagcggc

SEQ ID NO: 360918 - DNA, 25 bp, Artificial
  Probe
tcatgtttgtgtcatcagcgaaagt

SEQ ID NO: 360919 - DNA, 25 bp, Artificial
  Probe
tatgcccttgactataatgagcact

SEQ ID NO: 360920 - DNA, 25 bp, Artificial
  Probe
atgcccttgactataatgagcactt

SEQ ID NO: 360921 - DNA, 25 bp, Artificial
  Probe
aaagcctaaaagacagcggcaagtt

SEQ ID NO: 360922 - DNA, 25 bp, Artificial
  Probe
agccaagtacaaagcctaaaagaca

SEQ ID NO: 360923 - DNA, 25 bp, Artificial
  Probe
gcacttcagggatttgaatcatgtt

SEQ ID NO: 360924 - DNA, 25 bp, Artificial
  Probe
aagacagcggcaagttgaatctaca

SEQ ID NO: 360925 - DNA, 25 bp, Artificial
  Probe
tgtcatcagcgaaagtggaaaagcc

SEQ ID NO: 360926 - DNA, 25 bp, Artificial
  Probe
gatatgcccttgactataatgagca

SEQ ID NO: 360927 - DNA, 25 bp, Artificial
  Probe
aatgagcacttcagggatttgaatc

SEQ ID NO: 360928 - DNA, 25 bp, Artificial
  Probe
aatcatgtttgtgtcatcagcgaaa

SEQ ID NO: 360929 - DNA, 25 bp, Artificial
  Probe
tacaaagcctaaaagacagcggcaa

SEQ ID NO: 360930 - DNA, 25 bp, Artificial
  Probe
aagtacaaagcctaaaagacagcgg

SEQ ID NO: 360931 - DNA, 25 bp, Artificial
  Probe
ctataatgagcacttcagggatttg

SEQ ID NO: 360932 - DNA, 25 bp, Artificial
  Probe
tttgttgttggatatgcccttgact

SEQ ID NO: 360933 - DNA, 25 bp, Artificial
  Probe
agcacttcagggatttgaatcatgt

SEQ ID NO: 360934 - DNA, 25 bp, Artificial
  Probe
gcccttgactataatgagcacttca

SEQ ID NO: 360935 - DNA, 25 bp, Artificial
  Probe
gtcatcagcgaaagtggaaaagcca

SEQ ID NO: 360936 - DNA, 25 bp, Artificial
  Probe
gtacaaagcctaaaagacagcggca

SEQ ID NO: 360937 - DNA, 25 bp, Artificial
  Probe
ttgttgttggatatgcccttgacta

SEQ ID NO: 360938 - DNA, 25 bp, Artificial
  Probe
ggctatgcaggctctccagccctgg

SEQ ID NO: 360939 - DNA, 25 bp, Artificial
  Probe
cgactgcccaagtccctgtaggagg

SEQ ID NO: 360940 - DNA, 25 bp, Artificial
  Probe
cctgtcttggcacctgcgggtcgag

SEQ ID NO: 360941 - DNA, 25 bp, Artificial
  Probe
ctcctttgaggaaaggcagccaaag

SEQ ID NO: 360942 - DNA, 25 bp, Artificial
  Probe
ggttctcaccagcaccacggacgtg

SEQ ID NO: 360943 - DNA, 25 bp, Artificial
  Probe
agaataggccggtacacacggggct

SEQ ID NO: 360944 - DNA, 25 bp, Artificial
  Probe
cctcatcccggctcttagacagtag

SEQ ID NO: 360945 - DNA, 25 bp, Artificial
  Probe
acgacactcggctactctggaacac

SEQ ID NO: 360946 - DNA, 25 bp, Artificial
  Probe
accgtctccgcacgttgtcctggat

SEQ ID NO: 360947 - DNA, 25 bp, Artificial
  Probe
gtggacctcagagtccgctcgcagc

SEQ ID NO: 360948 - DNA, 25 bp, Artificial
  Probe
caagagaggcccaaccaccagaggc

SEQ ID NO: 360949 - DNA, 25 bp, Artificial
  Probe
atcagcgcctgcagtgcttcctcat

SEQ ID NO: 360950 - DNA, 25 bp, Artificial
  Probe
tcgcagccagatcagcgcctgcagt

SEQ ID NO: 360951 - DNA, 25 bp, Artificial
  Probe
ggatcatgaccagaacaggcccctc

SEQ ID NO: 360952 - DNA, 25 bp, Artificial
  Probe
gaaaggcagccaaagcacagagagg

SEQ ID NO: 360953 - DNA, 25 bp, Artificial
  Probe
ccgactgcccaagtccctgtaggag

SEQ ID NO: 360954 - DNA, 25 bp, Artificial
  Probe
cagtctagggactctgggcagtgct

SEQ ID NO: 360955 - DNA, 25 bp, Artificial
  Probe
gatgggccctctgttgctctcccag

SEQ ID NO: 360956 - DNA, 25 bp, Artificial
  Probe
ccaaggctacccagagcttcctggg

SEQ ID NO: 360957 - DNA, 25 bp, Artificial
  Probe
gcctgcactcttctcaacagtctag

SEQ ID NO: 360958 - DNA, 25 bp, Artificial
  Probe
gtcgaagatggtctgtaggtacacg

SEQ ID NO: 360959 - DNA, 25 bp, Artificial
  Probe
tgggttctcaccagcaccacggacg

SEQ ID NO: 360960 - DNA, 25 bp, Artificial
  Probe
aactcccagtggacctcagagtccg

SEQ ID NO: 360961 - DNA, 25 bp, Artificial
  Probe
ctgcgggtcgaggagagacctcctt

SEQ ID NO: 360962 - DNA, 25 bp, Artificial
  Probe
taggtctcagccacctaacttcctg

SEQ ID NO: 360963 - DNA, 25 bp, Artificial
  Probe
atcagcactgtaatgagaataggcc

SEQ ID NO: 360964 - DNA, 25 bp, Artificial
  Probe
aagccatgcccaaggcagcagaaga

SEQ ID NO: 360965 - DNA, 25 bp, Artificial
  Probe
ccctgtcttggcacctgcgggtcga

SEQ ID NO: 360966 - DNA, 25 bp, Artificial
  Probe
gcatgaagctaagcagcaggatcat

SEQ ID NO: 360967 - DNA, 25 bp, Artificial
  Probe
gcttcggtgagcagatgggccctct

SEQ ID NO: 360968 - DNA, 25 bp, Artificial
  Probe
gggtaccacacatgcttcaccgtct

SEQ ID NO: 360969 - DNA, 25 bp, Artificial
  Probe
gcagatgggccctctgttgctctcc

SEQ ID NO: 360970 - DNA, 25 bp, Artificial
  Probe
tcttagacagtaggaagcgaggcga

SEQ ID NO: 360971 - DNA, 25 bp, Artificial
  Probe
tggtggatgtccaaggctacccaga

SEQ ID NO: 360972 - DNA, 25 bp, Artificial
  Probe
tcggtgagcagatgggccctctgtt

SEQ ID NO: 360973 - DNA, 25 bp, Artificial
  Probe
ggagtgatgcctgtcagctgctgca

SEQ ID NO: 360974 - DNA, 25 bp, Artificial
  Probe
ggctacccagagcttcctgggttgg

SEQ ID NO: 360975 - DNA, 25 bp, Artificial
  Probe
caagccatgcccaaggcagcagaag

SEQ ID NO: 360976 - DNA, 25 bp, Artificial
  Probe
gagtccgctcgcagccagatcagcg

SEQ ID NO: 360977 - DNA, 25 bp, Artificial
  Probe
cgaccaggcgggtaccacacatgct

SEQ ID NO: 360978 - DNA, 25 bp, Artificial
  Probe
gtgctggccgcctgggttctcacca

SEQ ID NO: 360979 - DNA, 25 bp, Artificial
  Probe
cagaagacctggtgagagaggcttc

SEQ ID NO: 360980 - DNA, 25 bp, Artificial
  Probe
aggccggtacacacggggctcccag

SEQ ID NO: 360981 - DNA, 25 bp, Artificial
  Probe
ggactttaagaattgcctggggctg

SEQ ID NO: 360982 - DNA, 25 bp, Artificial
  Probe
ccagcaccacggacgtgctgtcgaa

SEQ ID NO: 360983 - DNA, 25 bp, Artificial
  Probe
cacctgcgggtcgaggagagacctc

SEQ ID NO: 360984 - DNA, 25 bp, Artificial
  Probe
ataccagccacactgatgctgatcc

SEQ ID NO: 360985 - DNA, 25 bp, Artificial
  Probe
acctactctgggtcctctctgtgga

SEQ ID NO: 360986 - DNA, 25 bp, Artificial
  Probe
ccaaggagctgtgtgggttgtccct

SEQ ID NO: 360987 - DNA, 25 bp, Artificial
  Probe
ttaagtgtgggatcaccattctctt

SEQ ID NO: 360988 - DNA, 25 bp, Artificial
  Probe
caggctcatcccaatgctgtaggcc

SEQ ID NO: 360989 - DNA, 25 bp, Artificial
  Probe
ttattcttagaagtggggctattcc

SEQ ID NO: 360990 - DNA, 25 bp, Artificial
  Probe
agctgatgtcagtcacaaccccaca

SEQ ID NO: 360991 - DNA, 25 bp, Artificial
  Probe
ctcccaggaccaaggagctgtgtgg

SEQ ID NO: 360992 - DNA, 25 bp, Artificial
  Probe
accctgtctctgttattcttagaag

SEQ ID NO: 360993 - DNA, 25 bp, Artificial
  Probe
tcattgatggggacaagggtgtcac

SEQ ID NO: 360994 - DNA, 25 bp, Artificial
  Probe
gtgagaccgacctcaggcctaccta

SEQ ID NO: 360995 - DNA, 25 bp, Artificial
  Probe
gacacctataccagccacactgatg

SEQ ID NO: 360996 - DNA, 25 bp, Artificial
  Probe
ccccactgtggctcatagagaagtt

SEQ ID NO: 360997 - DNA, 25 bp, Artificial
  Probe
cattgatggggacaagggtgtcaca

SEQ ID NO: 360998 - DNA, 25 bp, Artificial
  Probe
aggcaacttggcagttctggctaca

SEQ ID NO: 360999 - DNA, 25 bp, Artificial
  Probe
accaaggagctgtgtgggttgtccc

SEQ ID NO: 361000 - DNA, 25 bp, Artificial
  Probe
ctatgtatttcctttctgctctgag

SEQ ID NO: 361001 - DNA, 25 bp, Artificial
  Probe
tgagccaggagctgtctctgcctcc

SEQ ID NO: 361002 - DNA, 25 bp, Artificial
  Probe
tattcttagaagtggggctattcca

SEQ ID NO: 361003 - DNA, 25 bp, Artificial
  Probe
ctctgttattcttagaagtggggct

SEQ ID NO: 361004 - DNA, 25 bp, Artificial
  Probe
caagggtgtcacaggcctcaagtct

SEQ ID NO: 361005 - DNA, 25 bp, Artificial
  Probe
actgaccaggcaacttggcagttct

SEQ ID NO: 361006 - DNA, 25 bp, Artificial
  Probe
agctgtgtgggttgtccctggtctc

SEQ ID NO: 361007 - DNA, 25 bp, Artificial
  Probe
ctataccagccacactgatgctgat

SEQ ID NO: 361008 - DNA, 25 bp, Artificial
  Probe
tccagcaggctcatcccaatgctgt

SEQ ID NO: 361009 - DNA, 25 bp, Artificial
  Probe
cacgtgtctccaaagtgcctgcgag

SEQ ID NO: 361010 - DNA, 25 bp, Artificial
  Probe
gtatttcctttctgctctgagccag

SEQ ID NO: 361011 - DNA, 25 bp, Artificial
  Probe
ctagcctctgccagccaagtctgaa

SEQ ID NO: 361012 - DNA, 25 bp, Artificial
  Probe
ctggtgagaccgacctcaggcctac

SEQ ID NO: 361013 - DNA, 25 bp, Artificial
  Probe
gacaagggtgtcacaggcctcaagt

SEQ ID NO: 361014 - DNA, 25 bp, Artificial
  Probe
ggactcatactccagcaggctcatc

SEQ ID NO: 361015 - DNA, 25 bp, Artificial
  Probe
tcccaatgctgtaggccccaagagt

SEQ ID NO: 361016 - DNA, 25 bp, Artificial
  Probe
atcccagctgatgtcagtcacaacc

SEQ ID NO: 361017 - DNA, 25 bp, Artificial
  Probe
agggagctagggtctcccaggacca

SEQ ID NO: 361018 - DNA, 25 bp, Artificial
  Probe
ccaagagtcattgatggggacaagg

SEQ ID NO: 361019 - DNA, 25 bp, Artificial
  Probe
ctgtgtgggttgtccctggtctcta

SEQ ID NO: 361020 - DNA, 25 bp, Artificial
  Probe
gctgtaggccccaagagtcattgat

SEQ ID NO: 361021 - DNA, 25 bp, Artificial
  Probe
tgaccaggcaacttggcagttctgg

SEQ ID NO: 361022 - DNA, 25 bp, Artificial
  Probe
tgtccctggtctctatgtatttcct

SEQ ID NO: 361023 - DNA, 25 bp, Artificial
  Probe
cagccaagtctgaaggaagaaggga

SEQ ID NO: 361024 - DNA, 25 bp, Artificial
  Probe
ctgctctgagccaggagctgtctct

SEQ ID NO: 361025 - DNA, 25 bp, Artificial
  Probe
gccacactgatgctgatcccagctg

SEQ ID NO: 361026 - DNA, 25 bp, Artificial
  Probe
gaagttttgggctagcctctgccag

SEQ ID NO: 361027 - DNA, 25 bp, Artificial
  Probe
ctcccaggacacgtgtctccaaagt

SEQ ID NO: 361028 - DNA, 25 bp, Artificial
  Probe
cactgtggctcatagagaagttttg

SEQ ID NO: 361029 - DNA, 25 bp, Artificial
  Probe
acacaactgaccaggcaacttggca

SEQ ID NO: 361030 - DNA, 25 bp, Artificial
  Probe
tcctctgttttatggctttctgggg

SEQ ID NO: 361031 - DNA, 25 bp, Artificial
  Probe
accagctatactcttatttggaaag

SEQ ID NO: 361032 - DNA, 25 bp, Artificial
  Probe
cggccaagtcacacgcaggcttgtc

SEQ ID NO: 361033 - DNA, 25 bp, Artificial
  Probe
tgctcattcagctgggcattatccg

SEQ ID NO: 361034 - DNA, 25 bp, Artificial
  Probe
agataacatgagttcatctgccaaa

SEQ ID NO: 361035 - DNA, 25 bp, Artificial
  Probe
aacattctgggcttcgtgttccctt

SEQ ID NO: 361036 - DNA, 25 bp, Artificial
  Probe
caacggccaagtcacacgcaggctt

SEQ ID NO: 361037 - DNA, 25 bp, Artificial
  Probe
catgagttcatctgccaaaaagtct

SEQ ID NO: 361038 - DNA, 25 bp, Artificial
  Probe
aattgcctgaatcctctgttttatg

SEQ ID NO: 361039 - DNA, 25 bp, Artificial
  Probe
agcctgcaagtgaagtgatttcctg

SEQ ID NO: 361040 - DNA, 25 bp, Artificial
  Probe
tcttatttggaaagccctaaagaag

SEQ ID NO: 361041 - DNA, 25 bp, Artificial
  Probe
aattatggcgattgtgcttttcttc

SEQ ID NO: 361042 - DNA, 25 bp, Artificial
  Probe
tccgtgactgtgaaattgctgacat

SEQ ID NO: 361043 - DNA, 25 bp, Artificial
  Probe
agctgggcattatccgtgactgtga

SEQ ID NO: 361044 - DNA, 25 bp, Artificial
  Probe
gggttcaaagcctgcaagtgaagtg

SEQ ID NO: 361045 - DNA, 25 bp, Artificial
  Probe
agctcactcactaccgaagagtgtt

SEQ ID NO: 361046 - DNA, 25 bp, Artificial
  Probe
cagaggaccatttgggctaagcagc

SEQ ID NO: 361047 - DNA, 25 bp, Artificial
  Probe
gaagaacacgccaagaaatgatgac

SEQ ID NO: 361048 - DNA, 25 bp, Artificial
  Probe
caagtcacacgcaggcttgtcaaca

SEQ ID NO: 361049 - DNA, 25 bp, Artificial
  Probe
caaatattcacttttctggatgtgc

SEQ ID NO: 361050 - DNA, 25 bp, Artificial
  Probe
gggcattatccgtgactgtgaaatt

SEQ ID NO: 361051 - DNA, 25 bp, Artificial
  Probe
tgaagtgatttcctgacagcagaag

SEQ ID NO: 361052 - DNA, 25 bp, Artificial
  Probe
ttggaaagccctaaagaaggcttat

SEQ ID NO: 361053 - DNA, 25 bp, Artificial
  Probe
acagcagaagccagaggaccatttg

SEQ ID NO: 361054 - DNA, 25 bp, Artificial
  Probe
caaagaacattctgggcttcgtgtt

SEQ ID NO: 361055 - DNA, 25 bp, Artificial
  Probe
tgggcttcgtgttccctttccttat

SEQ ID NO: 361056 - DNA, 25 bp, Artificial
  Probe
aacacgccaagaaatgatgacatct

SEQ ID NO: 361057 - DNA, 25 bp, Artificial
  Probe
tgaaattgctgacattgtggacacc

SEQ ID NO: 361058 - DNA, 25 bp, Artificial
  Probe
gaatcctctgttttatggctttctg

SEQ ID NO: 361059 - DNA, 25 bp, Artificial
  Probe
ctaccgcccttcagataacatgagt

SEQ ID NO: 361060 - DNA, 25 bp, Artificial
  Probe
ccttcagataacatgagttcatctg

SEQ ID NO: 361061 - DNA, 25 bp, Artificial
  Probe
gctatactcttatttggaaagccct

SEQ ID NO: 361062 - DNA, 25 bp, Artificial
  Probe
agttcatctgccaaaaagtctgcat

SEQ ID NO: 361063 - DNA, 25 bp, Artificial
  Probe
attcagctgggcattatccgtgact

SEQ ID NO: 361064 - DNA, 25 bp, Artificial
  Probe
cctgacagcagaagccagaggacca

SEQ ID NO: 361065 - DNA, 25 bp, Artificial
  Probe
taacaaagaacattctgggcttcgt

SEQ ID NO: 361066 - DNA, 25 bp, Artificial
  Probe
cattatccgtgactgtgaaattgct

SEQ ID NO: 361067 - DNA, 25 bp, Artificial
  Probe
gttcatctgccaaaaagtctgcatc

SEQ ID NO: 361068 - DNA, 25 bp, Artificial
  Probe
attcagaagaacacgccaagaaatg

SEQ ID NO: 361069 - DNA, 25 bp, Artificial
  Probe
tctgggcttcgtgttccctttcctt

SEQ ID NO: 361070 - DNA, 25 bp, Artificial
  Probe
ctgtgaaattgctgacattgtggac

SEQ ID NO: 361071 - DNA, 25 bp, Artificial
  Probe
cactcactaccgaagagtgttcaac

SEQ ID NO: 361072 - DNA, 25 bp, Artificial
  Probe
tactcttatttggaaagccctaaag

SEQ ID NO: 361073 - DNA, 25 bp, Artificial
  Probe
gacattgtggacaccgctatgccca

SEQ ID NO: 361074 - DNA, 25 bp, Artificial
  Probe
ccaaatattcacttttctggatgtg

SEQ ID NO: 361075 - DNA, 25 bp, Artificial
  Probe
gaccatttgggctaagcagctcact

SEQ ID NO: 361076 - DNA, 25 bp, Artificial
  Probe
gaagcacgtcattggccttcaaatg

SEQ ID NO: 361077 - DNA, 25 bp, Artificial
  Probe
tgaagaaagcccaggagcataagag

SEQ ID NO: 361078 - DNA, 25 bp, Artificial
  Probe
tcttagcccggacagctttgaggtg

SEQ ID NO: 361079 - DNA, 25 bp, Artificial
  Probe
ccacgcctatataggttcttagccc

SEQ ID NO: 361080 - DNA, 25 bp, Artificial
  Probe
agcccaggagcataagagggagttc

SEQ ID NO: 361081 - DNA, 25 bp, Artificial
  Probe
tctgagctgcagcatcctgcttagc

SEQ ID NO: 361082 - DNA, 25 bp, Artificial
  Probe
gacagctttgaggtgtcactgggca

SEQ ID NO: 361083 - DNA, 25 bp, Artificial
  Probe
ggcatgacaggctatgggcgacccc

SEQ ID NO: 361084 - DNA, 25 bp, Artificial
  Probe
tcacagacagtcaactgcaggaggg

SEQ ID NO: 361085 - DNA, 25 bp, Artificial
  Probe
tagcccggacagctttgaggtgtca

SEQ ID NO: 361086 - DNA, 25 bp, Artificial
  Probe
gagctgcagcatcctgcttagcctg

SEQ ID NO: 361087 - DNA, 25 bp, Artificial
  Probe
gtgtcactgggcaaagatgactgca

SEQ ID NO: 361088 - DNA, 25 bp, Artificial
  Probe
ggcctcacaggctggcatgacaggc

SEQ ID NO: 361089 - DNA, 25 bp, Artificial
  Probe
aagatgactgcacatgggcagctcc

SEQ ID NO: 361090 - DNA, 25 bp, Artificial
  Probe
catgacaggctatgggcgaccccgg

SEQ ID NO: 361091 - DNA, 25 bp, Artificial
  Probe
caaagatgactgcacatgggcagct

SEQ ID NO: 361092 - DNA, 25 bp, Artificial
  Probe
tcactgggcaaagatgactgcacat

SEQ ID NO: 361093 - DNA, 25 bp, Artificial
  Probe
ggcgaccccggcagatcatcagtta

SEQ ID NO: 361094 - DNA, 25 bp, Artificial
  Probe
gaagaaagcccaggagcataagagg

SEQ ID NO: 361095 - DNA, 25 bp, Artificial
  Probe
aggctatgggcgaccccggcagatc

SEQ ID NO: 361096 - DNA, 25 bp, Artificial
  Probe
agctctgagctgcagcatcctgctt

SEQ ID NO: 361097 - DNA, 25 bp, Artificial
  Probe
gagatcccaactggtttatgaagaa

SEQ ID NO: 361098 - DNA, 25 bp, Artificial
  Probe
gcgaccccggcagatcatcagttag

SEQ ID NO: 361099 - DNA, 25 bp, Artificial
  Probe
ccccggcagatcatcagttagaaag

SEQ ID NO: 361100 - DNA, 25 bp, Artificial
  Probe
atataggttcttagcccggacagct

SEQ ID NO: 361101 - DNA, 25 bp, Artificial
  Probe
tcacaggctggcatgacaggctatg

SEQ ID NO: 361102 - DNA, 25 bp, Artificial
  Probe
tgtcactgggcaaagatgactgcac

SEQ ID NO: 361103 - DNA, 25 bp, Artificial
  Probe
ggaaggccagctctgagctgcagca

SEQ ID NO: 361104 - DNA, 25 bp, Artificial
  Probe
gggaagcacgtcattggccttcaaa

SEQ ID NO: 361105 - DNA, 25 bp, Artificial
  Probe
acagctttgaggtgtcactgggcaa

SEQ ID NO: 361106 - DNA, 25 bp, Artificial
  Probe
gcaaagatgactgcacatgggcagc

SEQ ID NO: 361107 - DNA, 25 bp, Artificial
  Probe
cggcagatcatcagttagaaaggga

SEQ ID NO: 361108 - DNA, 25 bp, Artificial
  Probe
tggagatcccaactggtttatgaag

SEQ ID NO: 361109 - DNA, 25 bp, Artificial
  Probe
tcccaactggtttatgaagaaagcc

SEQ ID NO: 361110 - DNA, 25 bp, Artificial
  Probe
ggagttcacagacagtcaactgcag

SEQ ID NO: 361111 - DNA, 25 bp, Artificial
  Probe
aaagcccaggagcataagagggagt

SEQ ID NO: 361112 - DNA, 25 bp, Artificial
  Probe
aaagggaaggccagctctgagctgc

SEQ ID NO: 361113 - DNA, 25 bp, Artificial
  Probe
cacaggctggcatgacaggctatgg

SEQ ID NO: 361114 - DNA, 25 bp, Artificial
  Probe
aagcccaggagcataagagggagtt

SEQ ID NO: 361115 - DNA, 25 bp, Artificial
  Probe
aagggaaggccagctctgagctgca

SEQ ID NO: 361116 - DNA, 25 bp, Artificial
  Probe
gatcccaactggtttatgaagaaag

SEQ ID NO: 361117 - DNA, 25 bp, Artificial
  Probe
cccggacagctttgaggtgtcactg

SEQ ID NO: 361118 - DNA, 25 bp, Artificial
  Probe
cgcctatataggttcttagcccgga

SEQ ID NO: 361119 - DNA, 25 bp, Artificial
  Probe
ctctgagctgcagcatcctgcttag

SEQ ID NO: 361120 - DNA, 25 bp, Artificial
  Probe
ctttgaggtgtcactgggcaaagat

SEQ ID NO: 361121 - DNA, 25 bp, Artificial
  Probe
aaggccagctctgagctgcagcatc

SEQ ID NO: 361122 - DNA, 25 bp, Artificial
  Probe
ccttctgagacatgggttagccctt

SEQ ID NO: 361123 - DNA, 25 bp, Artificial
  Probe
ccatttctagtgtgacagggatatt

SEQ ID NO: 361124 - DNA, 25 bp, Artificial
  Probe
tatatgtgactgtccttatttggac

SEQ ID NO: 361125 - DNA, 25 bp, Artificial
  Probe
ctgagacatgggttagccctttttt

SEQ ID NO: 361126 - DNA, 25 bp, Artificial
  Probe
gttcttcaagacaaaatgtcacagc

SEQ ID NO: 361127 - DNA, 25 bp, Artificial
  Probe
gccaggacagtcaggtatgaagctc

SEQ ID NO: 361128 - DNA, 25 bp, Artificial
  Probe
gtctttggaactcactagaaaattc

SEQ ID NO: 361129 - DNA, 25 bp, Artificial
  Probe
cccctgaatgagttggtgagttttt

SEQ ID NO: 361130 - DNA, 25 bp, Artificial
  Probe
gtatgaagctccacggtgggcaaag

SEQ ID NO: 361131 - DNA, 25 bp, Artificial
  Probe
cttatactgtatagaaccttttagg

SEQ ID NO: 361132 - DNA, 25 bp, Artificial
  Probe
tgagacatgggttagcccttttttc

SEQ ID NO: 361133 - DNA, 25 bp, Artificial
  Probe
accccctgaatgagttggtgagttt

SEQ ID NO: 361134 - DNA, 25 bp, Artificial
  Probe
ctaccattggccatcctatggcttc

SEQ ID NO: 361135 - DNA, 25 bp, Artificial
  Probe
gcctcatatttaacacttgggttct

SEQ ID NO: 361136 - DNA, 25 bp, Artificial
  Probe
ccatcctatggcttccttatatgtg

SEQ ID NO: 361137 - DNA, 25 bp, Artificial
  Probe
cagaaatccatttctagtgtgacag

SEQ ID NO: 361138 - DNA, 25 bp, Artificial
  Probe
cctatggcttccttatatgtgactg

SEQ ID NO: 361139 - DNA, 25 bp, Artificial
  Probe
agaaggcctgggtctttggaactca

SEQ ID NO: 361140 - DNA, 25 bp, Artificial
  Probe
ggataagtatctctgggttttcttc

SEQ ID NO: 361141 - DNA, 25 bp, Artificial
  Probe
ctctgtggagccttatactgtatag

SEQ ID NO: 361142 - DNA, 25 bp, Artificial
  Probe
accaccctaaacatggtgtgaagaa

SEQ ID NO: 361143 - DNA, 25 bp, Artificial
  Probe
gtgactgtccttatttggactccat

SEQ ID NO: 361144 - DNA, 25 bp, Artificial
  Probe
actggataagtatctctgggttttc

SEQ ID NO: 361145 - DNA, 25 bp, Artificial
  Probe
ctctgggttttcttcatactctgtg

SEQ ID NO: 361146 - DNA, 25 bp, Artificial
  Probe
cctatgggtattggtgggttcttca

SEQ ID NO: 361147 - DNA, 25 bp, Artificial
  Probe
ccttatatgtgactgtccttatttg

SEQ ID NO: 361148 - DNA, 25 bp, Artificial
  Probe
ccatttgactggataagtatctctg

SEQ ID NO: 361149 - DNA, 25 bp, Artificial
  Probe
tcaggtatgaagctccacggtgggc

SEQ ID NO: 361150 - DNA, 25 bp, Artificial
  Probe
ctcagaaatccatttctagtgtgac

SEQ ID NO: 361151 - DNA, 25 bp, Artificial
  Probe
cacttgggttcttccctagttgaat

SEQ ID NO: 361152 - DNA, 25 bp, Artificial
  Probe
cttatatgtgactgtccttatttgg

SEQ ID NO: 361153 - DNA, 25 bp, Artificial
  Probe
ccctaaacatggtgtgaagaaggcc

SEQ ID NO: 361154 - DNA, 25 bp, Artificial
  Probe
taacacttgggttcttccctagttg

SEQ ID NO: 361155 - DNA, 25 bp, Artificial
  Probe
ttggccatcctatggcttccttata

SEQ ID NO: 361156 - DNA, 25 bp, Artificial
  Probe
gaaatccatttctagtgtgacaggg

SEQ ID NO: 361157 - DNA, 25 bp, Artificial
  Probe
tagcctcagctcttctaccattggc

SEQ ID NO: 361158 - DNA, 25 bp, Artificial
  Probe
gaagctccacggtgggcaaaggaat

SEQ ID NO: 361159 - DNA, 25 bp, Artificial
  Probe
aatttccagctccttctgagacatg

SEQ ID NO: 361160 - DNA, 25 bp, Artificial
  Probe
gggttcttcaagacaaaatgtcaca

SEQ ID NO: 361161 - DNA, 25 bp, Artificial
  Probe
gggatatttttcacacagtctctat

SEQ ID NO: 361162 - DNA, 25 bp, Artificial
  Probe
caggacagtcaggtatgaagctcca

SEQ ID NO: 361163 - DNA, 25 bp, Artificial
  Probe
atagcctcagctcttctaccattgg

SEQ ID NO: 361164 - DNA, 25 bp, Artificial
  Probe
catactctgtggagccttatactgt

SEQ ID NO: 361165 - DNA, 25 bp, Artificial
  Probe
gagccttatactgtatagaaccttt

SEQ ID NO: 361166 - DNA, 25 bp, Artificial
  Probe
tccacggtgggcaaaggaattaata

SEQ ID NO: 361167 - DNA, 25 bp, Artificial
  Probe
tatagcctcatatttaacacttggg

SEQ ID NO: 361168 - DNA, 25 bp, Artificial
  Probe
tcgtagagggcgacagctttgaaga

SEQ ID NO: 361169 - DNA, 25 bp, Artificial
  Probe
acagccacctctatgggaccagcgt

SEQ ID NO: 361170 - DNA, 25 bp, Artificial
  Probe
cgacagagccacgaagctggagcag

SEQ ID NO: 361171 - DNA, 25 bp, Artificial
  Probe
tatcacaaagtgaaacgtgtcattg

SEQ ID NO: 361172 - DNA, 25 bp, Artificial
  Probe
gagcaagcccggaaagccttcgaca

SEQ ID NO: 361173 - DNA, 25 bp, Artificial
  Probe
agcccgagagagactctgattcctg

SEQ ID NO: 361174 - DNA, 25 bp, Artificial
  Probe
atcctcgatgtctcggccaatgccg

SEQ ID NO: 361175 - DNA, 25 bp, Artificial
  Probe
gatgtctcggccaatgccgtgcggc

SEQ ID NO: 361176 - DNA, 25 bp, Artificial
  Probe
ttctctccgagttcccctgacaagt

SEQ ID NO: 361177 - DNA, 25 bp, Artificial
  Probe
ctctatgggaccagcgtccagtctg

SEQ ID NO: 361178 - DNA, 25 bp, Artificial
  Probe
aagccttcgacagagccacgaagct

SEQ ID NO: 361179 - DNA, 25 bp, Artificial
  Probe
gactctgattcctgccctggcttcg

SEQ ID NO: 361180 - DNA, 25 bp, Artificial
  Probe
cgctccctggagaatgtgctagaga

SEQ ID NO: 361181 - DNA, 25 bp, Artificial
  Probe
atgtctcggccaatgccgtgcggcg

SEQ ID NO: 361182 - DNA, 25 bp, Artificial
  Probe
cagccatcgtagagggcgacagctt

SEQ ID NO: 361183 - DNA, 25 bp, Artificial
  Probe
tgattcctgccctggcttcggcctg

SEQ ID NO: 361184 - DNA, 25 bp, Artificial
  Probe
atcacagaggagcaagcccggaaag

SEQ ID NO: 361185 - DNA, 25 bp, Artificial
  Probe
aaagtgaaacgtgtcattgaagacc

SEQ ID NO: 361186 - DNA, 25 bp, Artificial
  Probe
acatccaggcacacaagttcattga

SEQ ID NO: 361187 - DNA, 25 bp, Artificial
  Probe
tcacagaggagcaagcccggaaagc

SEQ ID NO: 361188 - DNA, 25 bp, Artificial
  Probe
tcctcccgggagaaaatggagaagg

SEQ ID NO: 361189 - DNA, 25 bp, Artificial
  Probe
cacctctatgggaccagcgtccagt

SEQ ID NO: 361190 - DNA, 25 bp, Artificial
  Probe
agaaggacatccaggcacacaagtt

SEQ ID NO: 361191 - DNA, 25 bp, Artificial
  Probe
aggagttcacagagtgcttctcagc

SEQ ID NO: 361192 - DNA, 25 bp, Artificial
  Probe
tgtgtccctcatacgacacgtccta

SEQ ID NO: 361193 - DNA, 25 bp, Artificial
  Probe
tagacggccgggattaccactttgt

SEQ ID NO: 361194 - DNA, 25 bp, Artificial
  Probe
gggcgacagctttgaagagatctat

SEQ ID NO: 361195 - DNA, 25 bp, Artificial
  Probe
atcaataagcggatcacagaggagc

SEQ ID NO: 361196 - DNA, 25 bp, Artificial
  Probe
cgacacgtcctaagcgggaatatga

SEQ ID NO: 361197 - DNA, 25 bp, Artificial
  Probe
ccagcccgagagagactctgattcc

SEQ ID NO: 361198 - DNA, 25 bp, Artificial
  Probe
gccgggattaccactttgtctcctc

SEQ ID NO: 361199 - DNA, 25 bp, Artificial
  Probe
ggcacacaagttcattgaggctggc

SEQ ID NO: 361200 - DNA, 25 bp, Artificial
  Probe
cacgaagctggagcaggagttcaca

SEQ ID NO: 361201 - DNA, 25 bp, Artificial
  Probe
tcctaagcgggaatatgagatagac

SEQ ID NO: 361202 - DNA, 25 bp, Artificial
  Probe
ccctggagaatgtgctagagatcaa

SEQ ID NO: 361203 - DNA, 25 bp, Artificial
  Probe
ccacgaagctggagcaggagttcac

SEQ ID NO: 361204 - DNA, 25 bp, Artificial
  Probe
ttgaagacctctcaggcccctacat

SEQ ID NO: 361205 - DNA, 25 bp, Artificial
  Probe
ggggaagcactgcatcctcgatgtc

SEQ ID NO: 361206 - DNA, 25 bp, Artificial
  Probe
aagcggatcacagaggagcaagccc

SEQ ID NO: 361207 - DNA, 25 bp, Artificial
  Probe
aaacgtgtcattgaagacctctcag

SEQ ID NO: 361208 - DNA, 25 bp, Artificial
  Probe
gagaaggacatccaggcacacaagt

SEQ ID NO: 361209 - DNA, 25 bp, Artificial
  Probe
tcgacagagccacgaagctggagca

SEQ ID NO: 361210 - DNA, 25 bp, Artificial
  Probe
cgagttcccctgacaagtttggatc

SEQ ID NO: 361211 - DNA, 25 bp, Artificial
  Probe
gatgatcttctctccgagttcccct

SEQ ID NO: 361212 - DNA, 25 bp, Artificial
  Probe
ggccagtacaacagccacctctatg

SEQ ID NO: 361213 - DNA, 25 bp, Artificial
  Probe
aagagatctatcacaaagtgaaacg

SEQ ID NO: 361214 - DNA, 25 bp, Artificial
  Probe
gaatctccactggactccagccaag

SEQ ID NO: 361215 - DNA, 25 bp, Artificial
  Probe
ccccagcagggacttgtcatggtga

SEQ ID NO: 361216 - DNA, 25 bp, Artificial
  Probe
tggactccagccaagttggattcag

SEQ ID NO: 361217 - DNA, 25 bp, Artificial
  Probe
aggatggccagcagccatggcagcc

SEQ ID NO: 361218 - DNA, 25 bp, Artificial
  Probe
gcttatgagtgcaggcagcagcagt

SEQ ID NO: 361219 - DNA, 25 bp, Artificial
  Probe
ccacatggccccagcagggacttgt

SEQ ID NO: 361220 - DNA, 25 bp, Artificial
  Probe
ttcagaagggcctcacaagacaacc

SEQ ID NO: 361221 - DNA, 25 bp, Artificial
  Probe
aagctcttcaggaggaaaggatggc

SEQ ID NO: 361222 - DNA, 25 bp, Artificial
  Probe
gacagcagcttgtactatccacact

SEQ ID NO: 361223 - DNA, 25 bp, Artificial
  Probe
tctccactggactccagccaagttg

SEQ ID NO: 361224 - DNA, 25 bp, Artificial
  Probe
gaaaggatggccagcagccatggca

SEQ ID NO: 361225 - DNA, 25 bp, Artificial
  Probe
taccggccacattgatggagtaggg

SEQ ID NO: 361226 - DNA, 25 bp, Artificial
  Probe
atgaactatgggtgttcccatgagt

SEQ ID NO: 361227 - DNA, 25 bp, Artificial
  Probe
ggccagcagccatggcagccacatg

SEQ ID NO: 361228 - DNA, 25 bp, Artificial
  Probe
atgggtgttcccatgagtgttgcca

SEQ ID NO: 361229 - DNA, 25 bp, Artificial
  Probe
gttgccatgttccatgcacacagat

SEQ ID NO: 361230 - DNA, 25 bp, Artificial
  Probe
acaaggaggtgcaggcagagctact

SEQ ID NO: 361231 - DNA, 25 bp, Artificial
  Probe
cctctgcgaagacctcattggccag

SEQ ID NO: 361232 - DNA, 25 bp, Artificial
  Probe
atggcagccacatggccccagcagg

SEQ ID NO: 361233 - DNA, 25 bp, Artificial
  Probe
tgagtgttgccatgttccatgcaca

SEQ ID NO: 361234 - DNA, 25 bp, Artificial
  Probe
gaaacagatgcctggccaaggctga

SEQ ID NO: 361235 - DNA, 25 bp, Artificial
  Probe
acaagacaacccagaaacagatgcc

SEQ ID NO: 361236 - DNA, 25 bp, Artificial
  Probe
agaaggcaaagctcttcaggaggaa

SEQ ID NO: 361237 - DNA, 25 bp, Artificial
  Probe
caaagcagcaagacagcagcttgta

SEQ ID NO: 361238 - DNA, 25 bp, Artificial
  Probe
acctcattggccagtagtctcccaa

SEQ ID NO: 361239 - DNA, 25 bp, Artificial
  Probe
gatggagtagccatgctatgaacta

SEQ ID NO: 361240 - DNA, 25 bp, Artificial
  Probe
ttgtcatggtgatccctgtgagaaa

SEQ ID NO: 361241 - DNA, 25 bp, Artificial
  Probe
cccagaaacagatgcctggccaagg

SEQ ID NO: 361242 - DNA, 25 bp, Artificial
  Probe
gcctcacaagacaacccagaaacag

SEQ ID NO: 361243 - DNA, 25 bp, Artificial
  Probe
ggactggctgtgagccctctgcgaa

SEQ ID NO: 361244 - DNA, 25 bp, Artificial
  Probe
tgaactatgggtgttcccatgagtg

SEQ ID NO: 361245 - DNA, 25 bp, Artificial
  Probe
cgaagacctcattggccagtagtct

SEQ ID NO: 361246 - DNA, 25 bp, Artificial
  Probe
catggccccagcagggacttgtcat

SEQ ID NO: 361247 - DNA, 25 bp, Artificial
  Probe
gactgatgagcatgcccagggcacc

SEQ ID NO: 361248 - DNA, 25 bp, Artificial
  Probe
agccaagttggattcagaagggcct

SEQ ID NO: 361249 - DNA, 25 bp, Artificial
  Probe
gtttcctcaacaaggaggtgcaggc

SEQ ID NO: 361250 - DNA, 25 bp, Artificial
  Probe
cagtagtctcccaaggctggctgac

SEQ ID NO: 361251 - DNA, 25 bp, Artificial
  Probe
gttcttcagctccttccagggtctg

SEQ ID NO: 361252 - DNA, 25 bp, Artificial
  Probe
cgggtaccggccacattgatggagt

SEQ ID NO: 361253 - DNA, 25 bp, Artificial
  Probe
ctggccaaggctgaagaggcaaagc

SEQ ID NO: 361254 - DNA, 25 bp, Artificial
  Probe
atgagcatgcccagggcaccctgcg

SEQ ID NO: 361255 - DNA, 25 bp, Artificial
  Probe
agtagtctcccaaggctggctgaca

SEQ ID NO: 361256 - DNA, 25 bp, Artificial
  Probe
ctgtgagaaacttcagcttatgagt

SEQ ID NO: 361257 - DNA, 25 bp, Artificial
  Probe
atgagtgttgccatgttccatgcac

SEQ ID NO: 361258 - DNA, 25 bp, Artificial
  Probe
tggccagcagccatggcagccacat

SEQ ID NO: 361259 - DNA, 25 bp, Artificial
  Probe
tgctatgaactatgggtgttcccat

SEQ ID NO: 361260 - DNA, 25 bp, Artificial
  Probe
ggcctcactgccttcagggacactg

SEQ ID NO: 361261 - DNA, 25 bp, Artificial
  Probe
cgtccgtgctctctgtggtggagat

SEQ ID NO: 361262 - DNA, 25 bp, Artificial
  Probe
gtcatcttcgacctcctggtcatca

SEQ ID NO: 361263 - DNA, 25 bp, Artificial
  Probe
ggtctagcccagtctcccacttggg

SEQ ID NO: 361264 - DNA, 25 bp, Artificial
  Probe
aacgatctgctcagagctgccctgc

SEQ ID NO: 361265 - DNA, 25 bp, Artificial
  Probe
ctgtggtttggctcgtccgtgctct

SEQ ID NO: 361266 - DNA, 25 bp, Artificial
  Probe
agacaagttccctcttccctcggat

SEQ ID NO: 361267 - DNA, 25 bp, Artificial
  Probe
gcttctgaacactgccttccacaag

SEQ ID NO: 361268 - DNA, 25 bp, Artificial
  Probe
gcctctgtggtgttgtctccttctt

SEQ ID NO: 361269 - DNA, 25 bp, Artificial
  Probe
ctccttgtgtggtcagggatgagat

SEQ ID NO: 361270 - DNA, 25 bp, Artificial
  Probe
ccccacagtgtactgtattatatgt

SEQ ID NO: 361271 - DNA, 25 bp, Artificial
  Probe
atgttcacattcttttgtgtctgcc

SEQ ID NO: 361272 - DNA, 25 bp, Artificial
  Probe
tactggtctccaggacgaggggcca

SEQ ID NO: 361273 - DNA, 25 bp, Artificial
  Probe
ggtgttctctctcattctcaagact

SEQ ID NO: 361274 - DNA, 25 bp, Artificial
  Probe
ttcttttgtgaactcagttaccctg

SEQ ID NO: 361275 - DNA, 25 bp, Artificial
  Probe
tcggatcagcccagccagacttgga

SEQ ID NO: 361276 - DNA, 25 bp, Artificial
  Probe
cgctctgagagaggagaaggatcct

SEQ ID NO: 361277 - DNA, 25 bp, Artificial
  Probe
gcatcccttagaaacctgcccaaag

SEQ ID NO: 361278 - DNA, 25 bp, Artificial
  Probe
gaaacctgcccaaaggcaccatttc

SEQ ID NO: 361279 - DNA, 25 bp, Artificial
  Probe
gtccctcagaacacacagtctatgc

SEQ ID NO: 361280 - DNA, 25 bp, Artificial
  Probe
aggtactcaataaaggcttgttcca

SEQ ID NO: 361281 - DNA, 25 bp, Artificial
  Probe
gcccccttgttagttctttggcaat

SEQ ID NO: 361282 - DNA, 25 bp, Artificial
  Probe
gccttccacaagcacagacaagttc

SEQ ID NO: 361283 - DNA, 25 bp, Artificial
  Probe
gtatccttccggtctagcccagtct

SEQ ID NO: 361284 - DNA, 25 bp, Artificial
  Probe
tctgcggcgcctgactgttctgcct

SEQ ID NO: 361285 - DNA, 25 bp, Artificial
  Probe
taaggggcccaggaagccgtccaga

SEQ ID NO: 361286 - DNA, 25 bp, Artificial
  Probe
tccaacctgggcagccagtggagcc

SEQ ID NO: 361287 - DNA, 25 bp, Artificial
  Probe
gagatggcggacgtcatcttcgacc

SEQ ID NO: 361288 - DNA, 25 bp, Artificial
  Probe
gatggatatctcacttcagcacatc

SEQ ID NO: 361289 - DNA, 25 bp, Artificial
  Probe
cgccgagccctctgtggtgtgcctg

SEQ ID NO: 361290 - DNA, 25 bp, Artificial
  Probe
tgcctatgctactctaggccccagt

SEQ ID NO: 361291 - DNA, 25 bp, Artificial
  Probe
acagtgtactgtattatatgttcac

SEQ ID NO: 361292 - DNA, 25 bp, Artificial
  Probe
cttctttgccccagcagggcatgac

SEQ ID NO: 361293 - DNA, 25 bp, Artificial
  Probe
gcctatgctactctaggccccagtg

SEQ ID NO: 361294 - DNA, 25 bp, Artificial
  Probe
ttctttgccccagcagggcatgacc

SEQ ID NO: 361295 - DNA, 25 bp, Artificial
  Probe
gtgaactcagttaccctgttatgtc

SEQ ID NO: 361296 - DNA, 25 bp, Artificial
  Probe
taccccagtgcctctgtggtgttgt

SEQ ID NO: 361297 - DNA, 25 bp, Artificial
  Probe
atgagatttgctctgttttgtatcc

SEQ ID NO: 361298 - DNA, 25 bp, Artificial
  Probe
ttgttagttctttggcaattcccct

SEQ ID NO: 361299 - DNA, 25 bp, Artificial
  Probe
ccttctttctgtttcctcagcctgg

SEQ ID NO: 361300 - DNA, 25 bp, Artificial
  Probe
ctgcctgagggaacaggctgagtaa

SEQ ID NO: 361301 - DNA, 25 bp, Artificial
  Probe
agtaagacagaccagggtaggcctg

SEQ ID NO: 361302 - DNA, 25 bp, Artificial
  Probe
ctgttctgcctgtgccctggcggcg

SEQ ID NO: 361303 - DNA, 25 bp, Artificial
  Probe
ccctgagctcccttgtaaactgatg

SEQ ID NO: 361304 - DNA, 25 bp, Artificial
  Probe
ctgacaaggaactttcctgggagag

SEQ ID NO: 361305 - DNA, 25 bp, Artificial
  Probe
tgctcctctccttgaacttgggtgg

SEQ ID NO: 361306 - DNA, 25 bp, Artificial
  Probe
acaacagcctgatttccccgaaatg

SEQ ID NO: 361307 - DNA, 25 bp, Artificial
  Probe
cttctggagaaggaagcaggtgttc

SEQ ID NO: 361308 - DNA, 25 bp, Artificial
  Probe
gccgcttagctctacaacagcctga

SEQ ID NO: 361309 - DNA, 25 bp, Artificial
  Probe
gaaccagcaggctaggagcctacag

SEQ ID NO: 361310 - DNA, 25 bp, Artificial
  Probe
aatcccgctaagtgtttagatttct

SEQ ID NO: 361311 - DNA, 25 bp, Artificial
  Probe
cttcgtcgaggtaggaagagctctc

SEQ ID NO: 361312 - DNA, 25 bp, Artificial
  Probe
tccccgaaatgatgaggcgaagtgg

SEQ ID NO: 361313 - DNA, 25 bp, Artificial
  Probe
gggcctcggctttccaagacaggca

SEQ ID NO: 361314 - DNA, 25 bp, Artificial
  Probe
gcactactccttcgtcgaggtagga

SEQ ID NO: 361315 - DNA, 25 bp, Artificial
  Probe
cagcaggctaggagcctacaggacg

SEQ ID NO: 361316 - DNA, 25 bp, Artificial
  Probe
aacagcctgatttccccgaaatgat

SEQ ID NO: 361317 - DNA, 25 bp, Artificial
  Probe
actccttcgtcgaggtaggaagagc

SEQ ID NO: 361318 - DNA, 25 bp, Artificial
  Probe
cgcttagctctacaacagcctgatt

SEQ ID NO: 361319 - DNA, 25 bp, Artificial
  Probe
cagtgcgcactactccttcgtcgag

SEQ ID NO: 361320 - DNA, 25 bp, Artificial
  Probe
aaggaagcaggtgttctggagacct

SEQ ID NO: 361321 - DNA, 25 bp, Artificial
  Probe
ccacatgaaccagcaggctaggagc

SEQ ID NO: 361322 - DNA, 25 bp, Artificial
  Probe
aggaagcaggtgttctggagaccta

SEQ ID NO: 361323 - DNA, 25 bp, Artificial
  Probe
gagacctagggagttaggtgtctcc

SEQ ID NO: 361324 - DNA, 25 bp, Artificial
  Probe
tcggctttccaagacaggcaagggg

SEQ ID NO: 361325 - DNA, 25 bp, Artificial
  Probe
cccttctggagaaggaagcaggtgt

SEQ ID NO: 361326 - DNA, 25 bp, Artificial
  Probe
gggagaccgccacatgaaccagcag

SEQ ID NO: 361327 - DNA, 25 bp, Artificial
  Probe
gcctcggctttccaagacaggcaag

SEQ ID NO: 361328 - DNA, 25 bp, Artificial
  Probe
gcgcactactccttcgtcgaggtag

SEQ ID NO: 361329 - DNA, 25 bp, Artificial
  Probe
tccttcgtcgaggtaggaagagctc

SEQ ID NO: 361330 - DNA, 25 bp, Artificial
  Probe
accgccacatgaaccagcaggctag

SEQ ID NO: 361331 - DNA, 25 bp, Artificial
  Probe
cgccacatgaaccagcaggctagga

SEQ ID NO: 361332 - DNA, 25 bp, Artificial
  Probe
agacctagggagttaggtgtctccg

SEQ ID NO: 361333 - DNA, 25 bp, Artificial
  Probe
gggaatcccgctaagtgtttagatt

SEQ ID NO: 361334 - DNA, 25 bp, Artificial
  Probe
gtcccttctggagaaggaagcaggt

SEQ ID NO: 361335 - DNA, 25 bp, Artificial
  Probe
cccgctaagtgtttagatttcttcg

SEQ ID NO: 361336 - DNA, 25 bp, Artificial
  Probe
ccagcaggctaggagcctacaggac

SEQ ID NO: 361337 - DNA, 25 bp, Artificial
  Probe
atttccccgaaatgatgaggcgaag

SEQ ID NO: 361338 - DNA, 25 bp, Artificial
  Probe
agtgtttagatttcttcgccgccgc

SEQ ID NO: 361339 - DNA, 25 bp, Artificial
  Probe
tcccgctaagtgtttagatttcttc

SEQ ID NO: 361340 - DNA, 25 bp, Artificial
  Probe
acatgaaccagcaggctaggagcct

SEQ ID NO: 361341 - DNA, 25 bp, Artificial
  Probe
ggggaatcccgctaagtgtttagat

SEQ ID NO: 361342 - DNA, 25 bp, Artificial
  Probe
cactactccttcgtcgaggtaggaa

SEQ ID NO: 361343 - DNA, 25 bp, Artificial
  Probe
ctgatttccccgaaatgatgaggcg

SEQ ID NO: 361344 - DNA, 25 bp, Artificial
  Probe
gagaccgccacatgaaccagcaggc

SEQ ID NO: 361345 - DNA, 25 bp, Artificial
  Probe
gtgcgcactactccttcgtcgaggt

SEQ ID NO: 361346 - DNA, 25 bp, Artificial
  Probe
gcttagctctacaacagcctgattt

SEQ ID NO: 361347 - DNA, 25 bp, Artificial
  Probe
gctttccaagacaggcaaggggtcg

SEQ ID NO: 361348 - DNA, 25 bp, Artificial
  Probe
gagggcctcggctttccaagacagg

SEQ ID NO: 361349 - DNA, 25 bp, Artificial
  Probe
gatttccccgaaatgatgaggcgaa

SEQ ID NO: 361350 - DNA, 25 bp, Artificial
  Probe
ggggagaccgccacatgaaccagca

SEQ ID NO: 361351 - DNA, 25 bp, Artificial
  Probe
gaatcccgctaagtgtttagatttc

SEQ ID NO: 361352 - DNA, 25 bp, Artificial
  Probe
ctcagtaggttggtctatgtggagt

SEQ ID NO: 361353 - DNA, 25 bp, Artificial
  Probe
ttgctctttagacatcaaaaaaaaa

SEQ ID NO: 361354 - DNA, 25 bp, Artificial
  Probe
ggttggtctatgtggagtgaggaag

SEQ ID NO: 361355 - DNA, 25 bp, Artificial
  Probe
cctttgctctttagacatcaaaaaa

SEQ ID NO: 361356 - DNA, 25 bp, Artificial
  Probe
taggttggtctatgtggagtgagga

SEQ ID NO: 361357 - DNA, 25 bp, Artificial
  Probe
gtaggttggtctatgtggagtgagg

SEQ ID NO: 361358 - DNA, 25 bp, Artificial
  Probe
ctatgtggagtgaggaaggggtaag

SEQ ID NO: 361359 - DNA, 25 bp, Artificial
  Probe
tgctctttagacatcaaaaaaaaaa

SEQ ID NO: 361360 - DNA, 25 bp, Artificial
  Probe
acacctttgctctttagacatcaaa

SEQ ID NO: 361361 - DNA, 25 bp, Artificial
  Probe
gacacctttgctctttagacatcaa

SEQ ID NO: 361362 - DNA, 25 bp, Artificial
  Probe
gtctatgtggagtgaggaaggggta

SEQ ID NO: 361363 - DNA, 25 bp, Artificial
  Probe
aggttggtctatgtggagtgaggaa

SEQ ID NO: 361364 - DNA, 25 bp, Artificial
  Probe
ggtctatgtggagtgaggaaggggt

SEQ ID NO: 361365 - DNA, 25 bp, Artificial
  Probe
tatgtggagtgaggaaggggtaagt

SEQ ID NO: 361366 - DNA, 25 bp, Artificial
  Probe
agtaggttggtctatgtggagtgag

SEQ ID NO: 361367 - DNA, 25 bp, Artificial
  Probe
ggctcagtaggttggtctatgtgga

SEQ ID NO: 361368 - DNA, 25 bp, Artificial
  Probe
acctttgctctttagacatcaaaaa

SEQ ID NO: 361369 - DNA, 25 bp, Artificial
  Probe
cacctttgctctttagacatcaaaa

SEQ ID NO: 361370 - DNA, 25 bp, Artificial
  Probe
ctttgctctttagacatcaaaaaaa

SEQ ID NO: 361371 - DNA, 25 bp, Artificial
  Probe
gctcagtaggttggtctatgtggag

SEQ ID NO: 361372 - DNA, 25 bp, Artificial
  Probe
tcagtaggttggtctatgtggagtg

SEQ ID NO: 361373 - DNA, 25 bp, Artificial
  Probe
ttggtctatgtggagtgaggaaggg

SEQ ID NO: 361374 - DNA, 25 bp, Artificial
  Probe
gttggtctatgtggagtgaggaagg

SEQ ID NO: 361375 - DNA, 25 bp, Artificial
  Probe
tttgctctttagacatcaaaaaaaa

SEQ ID NO: 361376 - DNA, 25 bp, Artificial
  Probe
tggtctatgtggagtgaggaagggg

SEQ ID NO: 361377 - DNA, 25 bp, Artificial
  Probe
gggctcagtaggttggtctatgtgg

SEQ ID NO: 361378 - DNA, 25 bp, Artificial
  Probe
cagtaggttggtctatgtggagtga

SEQ ID NO: 361379 - DNA, 25 bp, Artificial
  Probe
tgacacctttgctctttagacatca

SEQ ID NO: 361380 - DNA, 25 bp, Artificial
  Probe
attgccagcaccaccgtagagactg

SEQ ID NO: 361381 - DNA, 25 bp, Artificial
  Probe
tgaccaaaagtttgtggctatcagt

SEQ ID NO: 361382 - DNA, 25 bp, Artificial
  Probe
gaacctattgaccaaaagtttgtgg

SEQ ID NO: 361383 - DNA, 25 bp, Artificial
  Probe
tcaggtcaacaggaagtcagacatc

SEQ ID NO: 361384 - DNA, 25 bp, Artificial
  Probe
cagctacatcccagaccgtgtgcga

SEQ ID NO: 361385 - DNA, 25 bp, Artificial
  Probe
gccgcacaaggcaaatacatcgcca

SEQ ID NO: 361386 - DNA, 25 bp, Artificial
  Probe
tgacggttcagagagtcaggtgttc

SEQ ID NO: 361387 - DNA, 25 bp, Artificial
  Probe
cattgatgacggttcagagagtcag

SEQ ID NO: 361388 - DNA, 25 bp, Artificial
  Probe
atcaaagatatctacaaacgcatgg

SEQ ID NO: 361389 - DNA, 25 bp, Artificial
  Probe
gcctgcattggagctgttggaacct

SEQ ID NO: 361390 - DNA, 25 bp, Artificial
  Probe
gccattgccagcaccaccgtagaga

SEQ ID NO: 361391 - DNA, 25 bp, Artificial
  Probe
ctgcagaaccagaaaaggaggttga

SEQ ID NO: 361392 - DNA, 25 bp, Artificial
  Probe
tcatccctcagaatcaggtcaacag

SEQ ID NO: 361393 - DNA, 25 bp, Artificial
  Probe
aggttgagcctgcattggagctgtt

SEQ ID NO: 361394 - DNA, 25 bp, Artificial
  Probe
caaacgcatggctggttctgccttt

SEQ ID NO: 361395 - DNA, 25 bp, Artificial
  Probe
caggttattcgcatcatctgcatcc

SEQ ID NO: 361396 - DNA, 25 bp, Artificial
  Probe
agatatctacaaacgcatggctggt

SEQ ID NO: 361397 - DNA, 25 bp, Artificial
  Probe
aatgatgtctttggagaagccgatc

SEQ ID NO: 361398 - DNA, 25 bp, Artificial
  Probe
ggttattcgcatcatctgcatcctc

SEQ ID NO: 361399 - DNA, 25 bp, Artificial
  Probe
aaggcaaatacatcgccattgccag

SEQ ID NO: 361400 - DNA, 25 bp, Artificial
  Probe
tcccagaccgtgtgcgaaaggctgg

SEQ ID NO: 361401 - DNA, 25 bp, Artificial
  Probe
cgtggccgcacaaggcaaatacatc

SEQ ID NO: 361402 - DNA, 25 bp, Artificial
  Probe
caacgtggccgcacaaggcaaatac

SEQ ID NO: 361403 - DNA, 25 bp, Artificial
  Probe
catggctggttctgcctttgatttt

SEQ ID NO: 361404 - DNA, 25 bp, Artificial
  Probe
acagaatgatgtctttggagaagcc

SEQ ID NO: 361405 - DNA, 25 bp, Artificial
  Probe
gctggttctgcctttgattttgaga

SEQ ID NO: 361406 - DNA, 25 bp, Artificial
  Probe
agcccattgatgacggttcagagag

SEQ ID NO: 361407 - DNA, 25 bp, Artificial
  Probe
ctgcctttgattttgagaacatgaa

SEQ ID NO: 361408 - DNA, 25 bp, Artificial
  Probe
tctacaaacgcatggctggttctgc

SEQ ID NO: 361409 - DNA, 25 bp, Artificial
  Probe
tctgtgatcccagctacatcccaga

SEQ ID NO: 361410 - DNA, 25 bp, Artificial
  Probe
gctacatcccagaccgtgtgcgaaa

SEQ ID NO: 361411 - DNA, 25 bp, Artificial
  Probe
gaaaggctggccaggttattcgcat

SEQ ID NO: 361412 - DNA, 25 bp, Artificial
  Probe
ttatatgagcccattgatgacggtt

SEQ ID NO: 361413 - DNA, 25 bp, Artificial
  Probe
ccagcaccaccgtagagactgcaga

SEQ ID NO: 361414 - DNA, 25 bp, Artificial
  Probe
atgcacacaacgtggccgcacaagg

SEQ ID NO: 361415 - DNA, 25 bp, Artificial
  Probe
catcccagaccgtgtgcgaaaggct

SEQ ID NO: 361416 - DNA, 25 bp, Artificial
  Probe
tgtgcgaaaggctggccaggttatt

SEQ ID NO: 361417 - DNA, 25 bp, Artificial
  Probe
atctacaaacgcatggctggttctg

SEQ ID NO: 361418 - DNA, 25 bp, Artificial
  Probe
ctgttcctgctcctatgatgctacc

SEQ ID NO: 361419 - DNA, 25 bp, Artificial
  Probe
aacatgaagcgcaaacagaatgatg

SEQ ID NO: 361420 - DNA, 25 bp, Artificial
  Probe
ctatgcacacaacgtggccgcacaa

SEQ ID NO: 361421 - DNA, 25 bp, Artificial
  Probe
tggccaggttattcgcatcatctgc

SEQ ID NO: 361422 - DNA, 25 bp, Artificial
  Probe
gtggcccgctgcaagcagctgatct

SEQ ID NO: 361423 - DNA, 25 bp, Artificial
  Probe
gaatcaggtcaacaggaagtcagac

SEQ ID NO: 361424 - DNA, 25 bp, Artificial
  Probe
tgtctttggagaagccgatcagtga

SEQ ID NO: 361425 - DNA, 25 bp, Artificial
  Probe
ttggagaagccgatcagtgattgct

SEQ ID NO: 361426 - DNA, 25 bp, Artificial
  Probe
ctgtcttctagcagtaaggcagtga

SEQ ID NO: 361427 - DNA, 25 bp, Artificial
  Probe
cttctagcagtaaggcagtgaaagg

SEQ ID NO: 361428 - DNA, 25 bp, Artificial
  Probe
ctactcaagatagaatttggcaaga

SEQ ID NO: 361429 - DNA, 25 bp, Artificial
  Probe
agacatggcttgagaagctcctttg

SEQ ID NO: 361430 - DNA, 25 bp, Artificial
  Probe
taacccaagacatggcttgagaagc

SEQ ID NO: 361431 - DNA, 25 bp, Artificial
  Probe
ctcgactggccgtgtggcagaacag

SEQ ID NO: 361432 - DNA, 25 bp, Artificial
  Probe
aagctgtgcccacatgatactcttt

SEQ ID NO: 361433 - DNA, 25 bp, Artificial
  Probe
ttggcaagaaaacatccttaggaag

SEQ ID NO: 361434 - DNA, 25 bp, Artificial
  Probe
tgcacaaagctgtgcccacatgata

SEQ ID NO: 361435 - DNA, 25 bp, Artificial
  Probe
acatgatactctttagagtctcgac

SEQ ID NO: 361436 - DNA, 25 bp, Artificial
  Probe
ccccatgtaaagaactgtcttctag

SEQ ID NO: 361437 - DNA, 25 bp, Artificial
  Probe
cagtagatagctcgaccacagctac

SEQ ID NO: 361438 - DNA, 25 bp, Artificial
  Probe
tggcaagtggcctccactggaagcc

SEQ ID NO: 361439 - DNA, 25 bp, Artificial
  Probe
cctgtgtttctaaacggtggatgaa

SEQ ID NO: 361440 - DNA, 25 bp, Artificial
  Probe
catccttaggaagtttacagtgtgt

SEQ ID NO: 361441 - DNA, 25 bp, Artificial
  Probe
agatagctcgaccacagctactcaa

SEQ ID NO: 361442 - DNA, 25 bp, Artificial
  Probe
gcctccactggaagccagacctaga

SEQ ID NO: 361443 - DNA, 25 bp, Artificial
  Probe
ccaagacatggcttgagaagctcct

SEQ ID NO: 361444 - DNA, 25 bp, Artificial
  Probe
taaagaactgtcttctagcagtaag

SEQ ID NO: 361445 - DNA, 25 bp, Artificial
  Probe
ctttgaaaagcttctgtttatttcg

SEQ ID NO: 361446 - DNA, 25 bp, Artificial
  Probe
tagagtctcgactggccgtgtggca

SEQ ID NO: 361447 - DNA, 25 bp, Artificial
  Probe
agaactgtcttctagcagtaaggca

SEQ ID NO: 361448 - DNA, 25 bp, Artificial
  Probe
caatcagacttgagggctctccttt

SEQ ID NO: 361449 - DNA, 25 bp, Artificial
  Probe
ccactggaagccagacctagaccat

SEQ ID NO: 361450 - DNA, 25 bp, Artificial
  Probe
catgactaacccaagacatggcttg

SEQ ID NO: 361451 - DNA, 25 bp, Artificial
  Probe
tgtaaagaactgtcttctagcagta

SEQ ID NO: 361452 - DNA, 25 bp, Artificial
  Probe
atgaatggctcctggcaagtggcct

SEQ ID NO: 361453 - DNA, 25 bp, Artificial
  Probe
tgtggcagaacagacctgtgtttct

SEQ ID NO: 361454 - DNA, 25 bp, Artificial
  Probe
atttcatgactaacccaagacatgg

SEQ ID NO: 361455 - DNA, 25 bp, Artificial
  Probe
gaactgtcttctagcagtaaggcag

SEQ ID NO: 361456 - DNA, 25 bp, Artificial
  Probe
aagatgaatggctcctggcaagtgg

SEQ ID NO: 361457 - DNA, 25 bp, Artificial
  Probe
cttgagggctctcctttttaccttg

SEQ ID NO: 361458 - DNA, 25 bp, Artificial
  Probe
aacatccttaggaagtttacagtgt

SEQ ID NO: 361459 - DNA, 25 bp, Artificial
  Probe
aattagcagtagatagctcgaccac

SEQ ID NO: 361460 - DNA, 25 bp, Artificial
  Probe
gacttgagggctctcctttttacct

SEQ ID NO: 361461 - DNA, 25 bp, Artificial
  Probe
cgtgtggcagaacagacctgtgttt

SEQ ID NO: 361462 - DNA, 25 bp, Artificial
  Probe
tggccgtgtggcagaacagacctgt

SEQ ID NO: 361463 - DNA, 25 bp, Artificial
  Probe
ttgagggctctcctttttaccttgg

SEQ ID NO: 361464 - DNA, 25 bp, Artificial
  Probe
gcccacatgatactctttagagtct

SEQ ID NO: 361465 - DNA, 25 bp, Artificial
  Probe
cgactggccgtgtggcagaacagac

SEQ ID NO: 361466 - DNA, 25 bp, Artificial
  Probe
gcaagaaaacatccttaggaagttt

SEQ ID NO: 361467 - DNA, 25 bp, Artificial
  Probe
gatatgtcttacttggaacgagaac

SEQ ID NO: 361468 - DNA, 25 bp, Artificial
  Probe
gccagacctagaccatttcatgact

SEQ ID NO: 361469 - DNA, 25 bp, Artificial
  Probe
tgatactctttagagtctcgactgg

SEQ ID NO: 361470 - DNA, 25 bp, Artificial
  Probe
cttgagaagctcctttgtgttattt

SEQ ID NO: 361471 - DNA, 25 bp, Artificial
  Probe
aaatttctgcaatcagacttgaggg

SEQ ID NO: 361472 - DNA, 25 bp, Artificial
  Probe
agctgagtgttcagctgtgttctgt

SEQ ID NO: 361473 - DNA, 25 bp, Artificial
  Probe
tgtacctgtcagattctgagcaagt

SEQ ID NO: 361474 - DNA, 25 bp, Artificial
  Probe
cttcagagggaaaggcctgattaat

SEQ ID NO: 361475 - DNA, 25 bp, Artificial
  Probe
tgagctgagtgttcagctgtgttct

SEQ ID NO: 361476 - DNA, 25 bp, Artificial
  Probe
gtatagatcatgctgtggtgtccag

SEQ ID NO: 361477 - DNA, 25 bp, Artificial
  Probe
ttacaaactgagacaaacccctgag

SEQ ID NO: 361478 - DNA, 25 bp, Artificial
  Probe
aaacccctgagctgagtgttcagct

SEQ ID NO: 361479 - DNA, 25 bp, Artificial
  Probe
tctgtacctgtcagattctgagcaa

SEQ ID NO: 361480 - DNA, 25 bp, Artificial
  Probe
ggtatagatcatgctgtggtgtcca

SEQ ID NO: 361481 - DNA, 25 bp, Artificial
  Probe
gtaaagcaattccatggctttcttc

SEQ ID NO: 361482 - DNA, 25 bp, Artificial
  Probe
ggtctaggacgtgtatgccacctta

SEQ ID NO: 361483 - DNA, 25 bp, Artificial
  Probe
caaactgagacaaacccctgagctg

SEQ ID NO: 361484 - DNA, 25 bp, Artificial
  Probe
caggtagctggaacccttcagaggg

SEQ ID NO: 361485 - DNA, 25 bp, Artificial
  Probe
gacaaacccctgagctgagtgttca

SEQ ID NO: 361486 - DNA, 25 bp, Artificial
  Probe
tgtgttctgtacctgtcagattctg

SEQ ID NO: 361487 - DNA, 25 bp, Artificial
  Probe
tcatgctgtggtgtccaggtagctg

SEQ ID NO: 361488 - DNA, 25 bp, Artificial
  Probe
tggaacccttcagagggaaaggcct

SEQ ID NO: 361489 - DNA, 25 bp, Artificial
  Probe
gctgagtgttcagctgtgttctgta

SEQ ID NO: 361490 - DNA, 25 bp, Artificial
  Probe
cgtgtatgccaccttacaaactgag

SEQ ID NO: 361491 - DNA, 25 bp, Artificial
  Probe
atagatcatgctgtggtgtccaggt

SEQ ID NO: 361492 - DNA, 25 bp, Artificial
  Probe
tacaaactgagacaaacccctgagc

SEQ ID NO: 361493 - DNA, 25 bp, Artificial
  Probe
tggtgtccaggtagctggaaccctt

SEQ ID NO: 361494 - DNA, 25 bp, Artificial
  Probe
tacctgtcagattctgagcaagttg

SEQ ID NO: 361495 - DNA, 25 bp, Artificial
  Probe
cctgagctgagtgttcagctgtgtt

SEQ ID NO: 361496 - DNA, 25 bp, Artificial
  Probe
gttctgtacctgtcagattctgagc

SEQ ID NO: 361497 - DNA, 25 bp, Artificial
  Probe
ctaggacgtgtatgccaccttacaa

SEQ ID NO: 361498 - DNA, 25 bp, Artificial
  Probe
gtatgccaccttacaaactgagaca

SEQ ID NO: 361499 - DNA, 25 bp, Artificial
  Probe
acctgcttagtcctgcctcaacatg

SEQ ID NO: 361500 - DNA, 25 bp, Artificial
  Probe
ccttcagagggaaaggcctgattaa

SEQ ID NO: 361501 - DNA, 25 bp, Artificial
  Probe
cccctgagctgagtgttcagctgtg

SEQ ID NO: 361502 - DNA, 25 bp, Artificial
  Probe
gttcagctgtgttctgtacctgtca

SEQ ID NO: 361503 - DNA, 25 bp, Artificial
  Probe
gagacaaacccctgagctgagtgtt

SEQ ID NO: 361504 - DNA, 25 bp, Artificial
  Probe
tagctggaacccttcagagggaaag

SEQ ID NO: 361505 - DNA, 25 bp, Artificial
  Probe
ctgtacctgtcagattctgagcaag

SEQ ID NO: 361506 - DNA, 25 bp, Artificial
  Probe
gtgttctgtacctgtcagattctga

SEQ ID NO: 361507 - DNA, 25 bp, Artificial
  Probe
ctgtggtgtccaggtagctggaacc

SEQ ID NO: 361508 - DNA, 25 bp, Artificial
  Probe
gacgtgtatgccaccttacaaactg

SEQ ID NO: 361509 - DNA, 25 bp, Artificial
  Probe
tgttcagctgtgttctgtacctgtc

SEQ ID NO: 361510 - DNA, 25 bp, Artificial
  Probe
tgtatgccaccttacaaactgagac

SEQ ID NO: 361511 - DNA, 25 bp, Artificial
  Probe
ttcagctgtgttctgtacctgtcag

SEQ ID NO: 361512 - DNA, 25 bp, Artificial
  Probe
caaacccctgagctgagtgttcagc

SEQ ID NO: 361513 - DNA, 25 bp, Artificial
  Probe
agctggaacccttcagagggaaagg

SEQ ID NO: 361514 - DNA, 25 bp, Artificial
  Probe
ccaggtagctggaacccttcagagg

SEQ ID NO: 361515 - DNA, 25 bp, Artificial
  Probe
gctgtgttctgtacctgtcagattc

SEQ ID NO: 361516 - DNA, 25 bp, Artificial
  Probe
aaactgagacaaacccctgagctga

SEQ ID NO: 361517 - DNA, 25 bp, Artificial
  Probe
agatcatgctgtggtgtccaggtag

SEQ ID NO: 361518 - DNA, 25 bp, Artificial
  Probe
aaagctgggcccaatgggcaaattc

SEQ ID NO: 361519 - DNA, 25 bp, Artificial
  Probe
acttcaaagtgaagccaggagatgt

SEQ ID NO: 361520 - DNA, 25 bp, Artificial
  Probe
caactttcctatcctggataaagga

SEQ ID NO: 361521 - DNA, 25 bp, Artificial
  Probe
ctgctcactgtttggggagcaaaat

SEQ ID NO: 361522 - DNA, 25 bp, Artificial
  Probe
ggggacccaaagatcaaacgtgctt

SEQ ID NO: 361523 - DNA, 25 bp, Artificial
  Probe
caatgggcaaattcccagacaaact

SEQ ID NO: 361524 - DNA, 25 bp, Artificial
  Probe
gttcagctccagaggccttcaccaa

SEQ ID NO: 361525 - DNA, 25 bp, Artificial
  Probe
ggcatcgtcgcctatggatctaaaa

SEQ ID NO: 361526 - DNA, 25 bp, Artificial
  Probe
agtaaggccaagaggactagagctg

SEQ ID NO: 361527 - DNA, 25 bp, Artificial
  Probe
aagatgcagcaagtcatccctgtgg

SEQ ID NO: 361528 - DNA, 25 bp, Artificial
  Probe
ggcctcttgtgtgtaaaaaagtggc

SEQ ID NO: 361529 - DNA, 25 bp, Artificial
  Probe
tcaactttcctatcctggataaagg

SEQ ID NO: 361530 - DNA, 25 bp, Artificial
  Probe
agatcaaacgtgcttcctttggggg

SEQ ID NO: 361531 - DNA, 25 bp, Artificial
  Probe
gttgagctaacagtacaggaggatc

SEQ ID NO: 361532 - DNA, 25 bp, Artificial
  Probe
ctcagtctgcccagaagcaacttca

SEQ ID NO: 361533 - DNA, 25 bp, Artificial
  Probe
ttcctatcctggataaaggaaacta

SEQ ID NO: 361534 - DNA, 25 bp, Artificial
  Probe
tcgcctatggatctaaaaatggttc

SEQ ID NO: 361535 - DNA, 25 bp, Artificial
  Probe
gcccacaacatcaaagaacaggaga

SEQ ID NO: 361536 - DNA, 25 bp, Artificial
  Probe
gccgcgggcatcgtcgcctatggat

SEQ ID NO: 361537 - DNA, 25 bp, Artificial
  Probe
catcatgctattaaagctgaagagt

SEQ ID NO: 361538 - DNA, 25 bp, Artificial
  Probe
ccgcgggcatcgtcgcctatggatc

SEQ ID NO: 361539 - DNA, 25 bp, Artificial
  Probe
aatggttcagctccagaggccttca

SEQ ID NO: 361540 - DNA, 25 bp, Artificial
  Probe
gaggccttcaccaaagtctcaactt

SEQ ID NO: 361541 - DNA, 25 bp, Artificial
  Probe
agctgggcccaatgggcaaattccc

SEQ ID NO: 361542 - DNA, 25 bp, Artificial
  Probe
ggactagagctgtgaagacgctcag

SEQ ID NO: 361543 - DNA, 25 bp, Artificial
  Probe
tgcagcaagtcatccctgtggtgaa

SEQ ID NO: 361544 - DNA, 25 bp, Artificial
  Probe
tgtgaagacgctcagtctgcccaga

SEQ ID NO: 361545 - DNA, 25 bp, Artificial
  Probe
caacgacatcatgctattaaagctg

SEQ ID NO: 361546 - DNA, 25 bp, Artificial
  Probe
ttatacaagaagactttgtgctgac

SEQ ID NO: 361547 - DNA, 25 bp, Artificial
  Probe
gcctcttgtgtgtaaaaaagtggcc

SEQ ID NO: 361548 - DNA, 25 bp, Artificial
  Probe
ttgggggcccacaacatcaaagaac

SEQ ID NO: 361549 - DNA, 25 bp, Artificial
  Probe
tacaacaaagccaatcagatatgtg

SEQ ID NO: 361550 - DNA, 25 bp, Artificial
  Probe
ctggagggcctcttgtgtgtaaaaa

SEQ ID NO: 361551 - DNA, 25 bp, Artificial
  Probe
caaagtgaagccaggagatgtgtgc

SEQ ID NO: 361552 - DNA, 25 bp, Artificial
  Probe
agagctgtgaagacgctcagtctgc

SEQ ID NO: 361553 - DNA, 25 bp, Artificial
  Probe
taaggccaagaggactagagctgtg

SEQ ID NO: 361554 - DNA, 25 bp, Artificial
  Probe
ggcccaatgggcaaattcccagaca

SEQ ID NO: 361555 - DNA, 25 bp, Artificial
  Probe
gcaagtcatccctgtggtgaaaatc

SEQ ID NO: 361556 - DNA, 25 bp, Artificial
  Probe
gggcaaattcccagacaaactgcaa

SEQ ID NO: 361557 - DNA, 25 bp, Artificial
  Probe
ctaacagtacaggaggatcaggagt

SEQ ID NO: 361558 - DNA, 25 bp, Artificial
  Probe
atccctgtggtgaaaatcattcccc

SEQ ID NO: 361559 - DNA, 25 bp, Artificial
  Probe
gctccagaggccttcaccaaagtct

SEQ ID NO: 361560 - DNA, 25 bp, Artificial
  Probe
agacgctcagtctgcccagaagcaa

SEQ ID NO: 361561 - DNA, 25 bp, Artificial
  Probe
aactgcaagaggttgagctaacagt

SEQ ID NO: 361562 - DNA, 25 bp, Artificial
  Probe
caacaaagccaatcagatatgtgcg

SEQ ID NO: 361563 - DNA, 25 bp, Artificial
  Probe
ctctggagggcctcttgtgtgtaaa

SEQ ID NO: 361564 - DNA, 25 bp, Artificial
  Probe
caccatggagtctgacagcgaggtg

SEQ ID NO: 361565 - DNA, 25 bp, Artificial
  Probe
tccctgaggctgcagccgctggaca

SEQ ID NO: 361566 - DNA, 25 bp, Artificial
  Probe
cctctcctggtgataggccacttct

SEQ ID NO: 361567 - DNA, 25 bp, Artificial
  Probe
aactagtgaactcaaaactgaggag

SEQ ID NO: 361568 - DNA, 25 bp, Artificial
  Probe
gtcacaaccattgtcagtgcctcat

SEQ ID NO: 361569 - DNA, 25 bp, Artificial
  Probe
aagagccagggcacagagcccatgt

SEQ ID NO: 361570 - DNA, 25 bp, Artificial
  Probe
ggtctaccctgaccaacagactctg

SEQ ID NO: 361571 - DNA, 25 bp, Artificial
  Probe
ggcattggctgaaccctgttaatag

SEQ ID NO: 361572 - DNA, 25 bp, Artificial
  Probe
gagccagggcacagagcccatgtcc

SEQ ID NO: 361573 - DNA, 25 bp, Artificial
  Probe
tggtgataggccacttctctgtctt

SEQ ID NO: 361574 - DNA, 25 bp, Artificial
  Probe
ggtcaagatgctggtaccagaatat

SEQ ID NO: 361575 - DNA, 25 bp, Artificial
  Probe
actccctgaggctgcagccgctgga

SEQ ID NO: 361576 - DNA, 25 bp, Artificial
  Probe
caggctccagagacccatagagtcc

SEQ ID NO: 361577 - DNA, 25 bp, Artificial
  Probe
tcagccccaggctgaggggttcata

SEQ ID NO: 361578 - DNA, 25 bp, Artificial
  Probe
ccttgccctagttggcattggctga

SEQ ID NO: 361579 - DNA, 25 bp, Artificial
  Probe
gtccaaagagccagggcacagagcc

SEQ ID NO: 361580 - DNA, 25 bp, Artificial
  Probe
catagggtcaagatgctggtaccag

SEQ ID NO: 361581 - DNA, 25 bp, Artificial
  Probe
tgctggtaccagaatattgaacttg

SEQ ID NO: 361582 - DNA, 25 bp, Artificial
  Probe
ggctgcagccgctggacaccatgga

SEQ ID NO: 361583 - DNA, 25 bp, Artificial
  Probe
aactgaggagtcacaaccattgtca

SEQ ID NO: 361584 - DNA, 25 bp, Artificial
  Probe
tctcctggtgataggccacttctct

SEQ ID NO: 361585 - DNA, 25 bp, Artificial
  Probe
gtgcctcatttcattagcccttgtc

SEQ ID NO: 361586 - DNA, 25 bp, Artificial
  Probe
agatgctggtaccagaatattgaac

SEQ ID NO: 361587 - DNA, 25 bp, Artificial
  Probe
tggaggccatctagatccgcatccc

SEQ ID NO: 361588 - DNA, 25 bp, Artificial
  Probe
cagccccaggctgaggggttcatag

SEQ ID NO: 361589 - DNA, 25 bp, Artificial
  Probe
ttcatagggtcaagatgctggtacc

SEQ ID NO: 361590 - DNA, 25 bp, Artificial
  Probe
ggcacagagcccatgtccctctggt

SEQ ID NO: 361591 - DNA, 25 bp, Artificial
  Probe
gtggaggccatctagatccgcatcc

SEQ ID NO: 361592 - DNA, 25 bp, Artificial
  Probe
cctagttggcattggctgaaccctg

SEQ ID NO: 361593 - DNA, 25 bp, Artificial
  Probe
cctagcccagtctttgctctctgtt

SEQ ID NO: 361594 - DNA, 25 bp, Artificial
  Probe
gcttgacaggggagcacatgctttg

SEQ ID NO: 361595 - DNA, 25 bp, Artificial
  Probe
ccttgtccaaagagccagggcacag

SEQ ID NO: 361596 - DNA, 25 bp, Artificial
  Probe
ctcaaaactgaggagtcacaaccat

SEQ ID NO: 361597 - DNA, 25 bp, Artificial
  Probe
tagcagacaggctccagagacccat

SEQ ID NO: 361598 - DNA, 25 bp, Artificial
  Probe
tcccaactatgactccctgaggctg

SEQ ID NO: 361599 - DNA, 25 bp, Artificial
  Probe
aatcagtgaccttgccctagttggc

SEQ ID NO: 361600 - DNA, 25 bp, Artificial
  Probe
ggccacttctctgtcttgttacaac

SEQ ID NO: 361601 - DNA, 25 bp, Artificial
  Probe
taagaaggcttgacaggggagcaca

SEQ ID NO: 361602 - DNA, 25 bp, Artificial
  Probe
actatgactccctgaggctgcagcc

SEQ ID NO: 361603 - DNA, 25 bp, Artificial
  Probe
atgccgaggtctaccctgaccaaca

SEQ ID NO: 361604 - DNA, 25 bp, Artificial
  Probe
tttcattagcccttgtccaaagagc

SEQ ID NO: 361605 - DNA, 25 bp, Artificial
  Probe
ctcagtctcccagaatcagtgacct

SEQ ID NO: 361606 - DNA, 25 bp, Artificial
  Probe
gtgaccttgccctagttggcattgg

SEQ ID NO: 361607 - DNA, 25 bp, Artificial
  Probe
attgtcagtgcctcatttcattagc

SEQ ID NO: 361608 - DNA, 25 bp, Artificial
  Probe
tgaaccctgttaatagacttggggg

SEQ ID NO: 361609 - DNA, 25 bp, Artificial
  Probe
acagagcccatgtccctctggtcag

SEQ ID NO: 361610 - DNA, 25 bp, Artificial
  Probe
aaatcgattctttgctcaccttgta

SEQ ID NO: 361611 - DNA, 25 bp, Artificial
  Probe
atcgattctttgctcaccttgtatc

SEQ ID NO: 361612 - DNA, 25 bp, Artificial
  Probe
accttgtatcaaggaaagcttggag

SEQ ID NO: 361613 - DNA, 25 bp, Artificial
  Probe
tctttgctcaccttgtatcaaggaa

SEQ ID NO: 361614 - DNA, 25 bp, Artificial
  Probe
atcaaggaaagcttggaggttttct

SEQ ID NO: 361615 - DNA, 25 bp, Artificial
  Probe
tgaaatcgattctttgctcaccttg

SEQ ID NO: 361616 - DNA, 25 bp, Artificial
  Probe
ttctttgctcaccttgtatcaagga

SEQ ID NO: 361617 - DNA, 25 bp, Artificial
  Probe
aggatgcatctggtacagtgaaatc

SEQ ID NO: 361618 - DNA, 25 bp, Artificial
  Probe
ctcaccttgtatcaaggaaagcttg

SEQ ID NO: 361619 - DNA, 25 bp, Artificial
  Probe
gaaatcgattctttgctcaccttgt

SEQ ID NO: 361620 - DNA, 25 bp, Artificial
  Probe
caccttgtatcaaggaaagcttgga

SEQ ID NO: 361621 - DNA, 25 bp, Artificial
  Probe
aatcgattctttgctcaccttgtat

SEQ ID NO: 361622 - DNA, 25 bp, Artificial
  Probe
gattctttgctcaccttgtatcaag

SEQ ID NO: 361623 - DNA, 25 bp, Artificial
  Probe
tcaccttgtatcaaggaaagcttgg

SEQ ID NO: 361624 - DNA, 25 bp, Artificial
  Probe
cttgtatcaaggaaagcttggaggt

SEQ ID NO: 361625 - DNA, 25 bp, Artificial
  Probe
atgcatctggtacagtgaaatcgat

SEQ ID NO: 361626 - DNA, 25 bp, Artificial
  Probe
acagtgaaatcgattctttgctcac

SEQ ID NO: 361627 - DNA, 25 bp, Artificial
  Probe
attctttgctcaccttgtatcaagg

SEQ ID NO: 361628 - DNA, 25 bp, Artificial
  Probe
tttgctcaccttgtatcaaggaaag

SEQ ID NO: 361629 - DNA, 25 bp, Artificial
  Probe
gatgcatctggtacagtgaaatcga

SEQ ID NO: 361630 - DNA, 25 bp, Artificial
  Probe
catctggtacagtgaaatcgattct

SEQ ID NO: 361631 - DNA, 25 bp, Artificial
  Probe
ttgctcaccttgtatcaaggaaagc

SEQ ID NO: 361632 - DNA, 25 bp, Artificial
  Probe
ggatgcatctggtacagtgaaatcg

SEQ ID NO: 361633 - DNA, 25 bp, Artificial
  Probe
tgcatctggtacagtgaaatcgatt

SEQ ID NO: 361634 - DNA, 25 bp, Artificial
  Probe
cgattctttgctcaccttgtatcaa

SEQ ID NO: 361635 - DNA, 25 bp, Artificial
  Probe
tatcaaggaaagcttggaggttttc

SEQ ID NO: 361636 - DNA, 25 bp, Artificial
  Probe
agtgaaatcgattctttgctcacct

SEQ ID NO: 361637 - DNA, 25 bp, Artificial
  Probe
ttgtatcaaggaaagcttggaggtt

SEQ ID NO: 361638 - DNA, 25 bp, Artificial
  Probe
atctggtacagtgaaatcgattctt

SEQ ID NO: 361639 - DNA, 25 bp, Artificial
  Probe
gctcaccttgtatcaaggaaagctt

SEQ ID NO: 361640 - DNA, 25 bp, Artificial
  Probe
ctttgctcaccttgtatcaaggaaa

SEQ ID NO: 361641 - DNA, 25 bp, Artificial
  Probe
tgctcaccttgtatcaaggaaagct

SEQ ID NO: 361642 - DNA, 25 bp, Artificial
  Probe
gtgaaatcgattctttgctcacctt

SEQ ID NO: 361643 - DNA, 25 bp, Artificial
  Probe
gaggatgcatctggtacagtgaaat

SEQ ID NO: 361644 - DNA, 25 bp, Artificial
  Probe
ttactattgtgcaagatcggacagt

SEQ ID NO: 361645 - DNA, 25 bp, Artificial
  Probe
tcggacagtagctcctcttggtttg

SEQ ID NO: 361646 - DNA, 25 bp, Artificial
  Probe
agttactattgtgcaagatcggaca

SEQ ID NO: 361647 - DNA, 25 bp, Artificial
  Probe
gatcggacagtagctcctcttggtt

SEQ ID NO: 361648 - DNA, 25 bp, Artificial
  Probe
tgtgcaagatcggacagtagctcct

SEQ ID NO: 361649 - DNA, 25 bp, Artificial
  Probe
attgtgcaagatcggacagtagctc

SEQ ID NO: 361650 - DNA, 25 bp, Artificial
  Probe
aagatcggacagtagctcctcttgg

SEQ ID NO: 361651 - DNA, 25 bp, Artificial
  Probe
agatcggacagtagctcctcttggt

SEQ ID NO: 361652 - DNA, 25 bp, Artificial
  Probe
tagctcctcttggtttgcttactgg

SEQ ID NO: 361653 - DNA, 25 bp, Artificial
  Probe
agtagctcctcttggtttgcttact

SEQ ID NO: 361654 - DNA, 25 bp, Artificial
  Probe
gtagctcctcttggtttgcttactg

SEQ ID NO: 361655 - DNA, 25 bp, Artificial
  Probe
ggacagtagctcctcttggtttgct

SEQ ID NO: 361656 - DNA, 25 bp, Artificial
  Probe
ttgtgcaagatcggacagtagctcc

SEQ ID NO: 361657 - DNA, 25 bp, Artificial
  Probe
caagatcggacagtagctcctcttg

SEQ ID NO: 361658 - DNA, 25 bp, Artificial
  Probe
ctattgtgcaagatcggacagtagc

SEQ ID NO: 361659 - DNA, 25 bp, Artificial
  Probe
tgcaagatcggacagtagctcctct

SEQ ID NO: 361660 - DNA, 25 bp, Artificial
  Probe
gacagtagctcctcttggtttgctt

SEQ ID NO: 361661 - DNA, 25 bp, Artificial
  Probe
cggacagtagctcctcttggtttgc

SEQ ID NO: 361662 - DNA, 25 bp, Artificial
  Probe
cagtagctcctcttggtttgcttac

SEQ ID NO: 361663 - DNA, 25 bp, Artificial
  Probe
tactattgtgcaagatcggacagta

SEQ ID NO: 361664 - DNA, 25 bp, Artificial
  Probe
acagtagctcctcttggtttgctta

SEQ ID NO: 361665 - DNA, 25 bp, Artificial
  Probe
actattgtgcaagatcggacagtag

SEQ ID NO: 361666 - DNA, 25 bp, Artificial
  Probe
agctcctcttggtttgcttactggg

SEQ ID NO: 361667 - DNA, 25 bp, Artificial
  Probe
gtgcaagatcggacagtagctcctc

SEQ ID NO: 361668 - DNA, 25 bp, Artificial
  Probe
tattgtgcaagatcggacagtagct

SEQ ID NO: 361669 - DNA, 25 bp, Artificial
  Probe
atcggacagtagctcctcttggttt

SEQ ID NO: 361670 - DNA, 25 bp, Artificial
  Probe
gttactattgtgcaagatcggacag

SEQ ID NO: 361671 - DNA, 25 bp, Artificial
  Probe
ggtccccagctgtttaatctcataa

SEQ ID NO: 361672 - DNA, 25 bp, Artificial
  Probe
tgtgtcacacaaaagaacaaagtga

SEQ ID NO: 361673 - DNA, 25 bp, Artificial
  Probe
atgaactttcccttctggaaagaag

SEQ ID NO: 361674 - DNA, 25 bp, Artificial
  Probe
catccaaaatgtgaactataattgg

SEQ ID NO: 361675 - DNA, 25 bp, Artificial
  Probe
tctctgtagacattagagttactct

SEQ ID NO: 361676 - DNA, 25 bp, Artificial
  Probe
acaacagcttctctgtgttgtcatc

SEQ ID NO: 361677 - DNA, 25 bp, Artificial
  Probe
gcttacaaagtgactgggaagtgtc

SEQ ID NO: 361678 - DNA, 25 bp, Artificial
  Probe
gtgttgctaagtggacagccttatt

SEQ ID NO: 361679 - DNA, 25 bp, Artificial
  Probe
ggatacccaccgtgggcatggcagt

SEQ ID NO: 361680 - DNA, 25 bp, Artificial
  Probe
taattttagcggttgtattcatccg

SEQ ID NO: 361681 - DNA, 25 bp, Artificial
  Probe
atggcacacatgctagactctccac

SEQ ID NO: 361682 - DNA, 25 bp, Artificial
  Probe
aagcatgtacgtggtgaagaaatcc

SEQ ID NO: 361683 - DNA, 25 bp, Artificial
  Probe
aactataatttctttgatggcatgc

SEQ ID NO: 361684 - DNA, 25 bp, Artificial
  Probe
cccttctggaaagaagatgaactag

SEQ ID NO: 361685 - DNA, 25 bp, Artificial
  Probe
cacatttctggtcattggtataatt

SEQ ID NO: 361686 - DNA, 25 bp, Artificial
  Probe
ggacagccttattctttagcacaaa

SEQ ID NO: 361687 - DNA, 25 bp, Artificial
  Probe
ggtcctcatggatgtgaatgacaac

SEQ ID NO: 361688 - DNA, 25 bp, Artificial
  Probe
agcttggctatggtgtagaccctgg

SEQ ID NO: 361689 - DNA, 25 bp, Artificial
  Probe
agtgcccctgggagcctcatctttg

SEQ ID NO: 361690 - DNA, 25 bp, Artificial
  Probe
tggacggaagttgtttccggccagc

SEQ ID NO: 361691 - DNA, 25 bp, Artificial
  Probe
aggtatcaaatacaactgccgtgtt

SEQ ID NO: 361692 - DNA, 25 bp, Artificial
  Probe
gtatcaatgcctcagctgtttaatt

SEQ ID NO: 361693 - DNA, 25 bp, Artificial
  Probe
cacgctttgaggaacaagtttatga

SEQ ID NO: 361694 - DNA, 25 bp, Artificial
  Probe
gacaagtctgttttctcccaactga

SEQ ID NO: 361695 - DNA, 25 bp, Artificial
  Probe
atgtgtcacacaaaagaacaaagtg

SEQ ID NO: 361696 - DNA, 25 bp, Artificial
  Probe
catcccaatcctcatcaatgatggg

SEQ ID NO: 361697 - DNA, 25 bp, Artificial
  Probe
cctcgcctagctaaggactacacag

SEQ ID NO: 361698 - DNA, 25 bp, Artificial
  Probe
tgaactaggtataaaccctgtgtgc

SEQ ID NO: 361699 - DNA, 25 bp, Artificial
  Probe
cagtcagttcggaggcccaagttta

SEQ ID NO: 361700 - DNA, 25 bp, Artificial
  Probe
tgactgggaagtgtccaaaatcaat

SEQ ID NO: 361701 - DNA, 25 bp, Artificial
  Probe
gggcagccacccatggaaggcattg

SEQ ID NO: 361702 - DNA, 25 bp, Artificial
  Probe
ctctgaggagctgaatttgaacaga

SEQ ID NO: 361703 - DNA, 25 bp, Artificial
  Probe
agttgaagatccacagtcccctgag

SEQ ID NO: 361704 - DNA, 25 bp, Artificial
  Probe
tccaccaagcacacacgctttgagg

SEQ ID NO: 361705 - DNA, 25 bp, Artificial
  Probe
atgttcaaggttgtacaccaagcac

SEQ ID NO: 361706 - DNA, 25 bp, Artificial
  Probe
ttatctctgtagacattagagttac

SEQ ID NO: 361707 - DNA, 25 bp, Artificial
  Probe
gcatgccttcttgtcctgcaacact

SEQ ID NO: 361708 - DNA, 25 bp, Artificial
  Probe
atcccaatcctcatcaatgatgggg

SEQ ID NO: 361709 - DNA, 25 bp, Artificial
  Probe
caggcaaccaggttgggatacccac

SEQ ID NO: 361710 - DNA, 25 bp, Artificial
  Probe
acacaggcttgttcttctgccatcc

SEQ ID NO: 361711 - DNA, 25 bp, Artificial
  Probe
gtttatgcatcatgtgctatatctg

SEQ ID NO: 361712 - DNA, 25 bp, Artificial
  Probe
gctgtttaatttcatccaaaatgtg

SEQ ID NO: 361713 - DNA, 25 bp, Artificial
  Probe
gcttacatacatgctgtacatgttt

SEQ ID NO: 361714 - DNA, 25 bp, Artificial
  Probe
ccaagtttacgtttgcccttggcag

SEQ ID NO: 361715 - DNA, 25 bp, Artificial
  Probe
cccttggcagagaaagcttacaaag

SEQ ID NO: 361716 - DNA, 25 bp, Artificial
  Probe
cggttgtattcatccgtatgaggaa

SEQ ID NO: 361717 - DNA, 25 bp, Artificial
  Probe
ctgtgtgcaacttccgcgttcccga

SEQ ID NO: 361718 - DNA, 25 bp, Artificial
  Probe
ttcttcctgtgttggctgccagtgt

SEQ ID NO: 361719 - DNA, 25 bp, Artificial
  Probe
accagggcctgtccaccagaacggg

SEQ ID NO: 361720 - DNA, 25 bp, Artificial
  Probe
agcgtcaacacgtggcgcgccttcg

SEQ ID NO: 361721 - DNA, 25 bp, Artificial
  Probe
tctttcatccacttgctgagctacg

SEQ ID NO: 361722 - DNA, 25 bp, Artificial
  Probe
accatcagcacactggggcctggct

SEQ ID NO: 361723 - DNA, 25 bp, Artificial
  Probe
aaccccctggtctactgtttcatgc

SEQ ID NO: 361724 - DNA, 25 bp, Artificial
  Probe
ctgtaaccagcgtagctggggaaga

SEQ ID NO: 361725 - DNA, 25 bp, Artificial
  Probe
cccgactggagatgacaacgctaac

SEQ ID NO: 361726 - DNA, 25 bp, Artificial
  Probe
accccctggtctactgtttcatgca

SEQ ID NO: 361727 - DNA, 25 bp, Artificial
  Probe
cctggacacatgtgcccgctgttgc

SEQ ID NO: 361728 - DNA, 25 bp, Artificial
  Probe
gcgcacaacgagcactctcaggggc

SEQ ID NO: 361729 - DNA, 25 bp, Artificial
  Probe
ctgcctggacacatgtgcccgctgt

SEQ ID NO: 361730 - DNA, 25 bp, Artificial
  Probe
gcttcgctgtccaggctaagctata

SEQ ID NO: 361731 - DNA, 25 bp, Artificial
  Probe
tccgcgttcccgactggagatgaca

SEQ ID NO: 361732 - DNA, 25 bp, Artificial
  Probe
tcttccagatgaggatcctcctacc

SEQ ID NO: 361733 - DNA, 25 bp, Artificial
  Probe
ccatcgcttcgctgtccaggctaag

SEQ ID NO: 361734 - DNA, 25 bp, Artificial
  Probe
cgttcccgactggagatgacaacgc

SEQ ID NO: 361735 - DNA, 25 bp, Artificial
  Probe
ccaaccaggccaagctgctggctaa

SEQ ID NO: 361736 - DNA, 25 bp, Artificial
  Probe
tctactgtttcatgcaccgccgctt

SEQ ID NO: 361737 - DNA, 25 bp, Artificial
  Probe
aacgagcactctcaggggcccctat

SEQ ID NO: 361738 - DNA, 25 bp, Artificial
  Probe
caggcgcacaacgagcactctcagg

SEQ ID NO: 361739 - DNA, 25 bp, Artificial
  Probe
gccaggcctgcctggacacatgtgc

SEQ ID NO: 361740 - DNA, 25 bp, Artificial
  Probe
ccagggcctgtccaccagaacgggg

SEQ ID NO: 361741 - DNA, 25 bp, Artificial
  Probe
agctataccaccatcagcacactgg

SEQ ID NO: 361742 - DNA, 25 bp, Artificial
  Probe
gtgttggctgccagtgtacagcgtc

SEQ ID NO: 361743 - DNA, 25 bp, Artificial
  Probe
cgaatgctgctagtgattgttttgc

SEQ ID NO: 361744 - DNA, 25 bp, Artificial
  Probe
cagtgtacagcgtcaacacgtggcg

SEQ ID NO: 361745 - DNA, 25 bp, Artificial
  Probe
ccctggtctactgtttcatgcaccg

SEQ ID NO: 361746 - DNA, 25 bp, Artificial
  Probe
gctacgtctctgcttgtgtcaaccc

SEQ ID NO: 361747 - DNA, 25 bp, Artificial
  Probe
ccggcctgtaaccagcgtagctggg

SEQ ID NO: 361748 - DNA, 25 bp, Artificial
  Probe
acgtggcgcgccttcgatggcccag

SEQ ID NO: 361749 - DNA, 25 bp, Artificial
  Probe
ccgcgttcccgactggagatgacaa

SEQ ID NO: 361750 - DNA, 25 bp, Artificial
  Probe
ctataccaccatcagcacactgggg

SEQ ID NO: 361751 - DNA, 25 bp, Artificial
  Probe
gacagtgatggctgctgtgtgcaac

SEQ ID NO: 361752 - DNA, 25 bp, Artificial
  Probe
tcctgtgttggctgccagtgtacag

SEQ ID NO: 361753 - DNA, 25 bp, Artificial
  Probe
aatgacagcgagacccaaagccggg

SEQ ID NO: 361754 - DNA, 25 bp, Artificial
  Probe
ctgccagtgtacagcgtcaacacgt

SEQ ID NO: 361755 - DNA, 25 bp, Artificial
  Probe
cttttcttcctgtgttggctgccag

SEQ ID NO: 361756 - DNA, 25 bp, Artificial
  Probe
ccacagcctcttccagatgaggatc

SEQ ID NO: 361757 - DNA, 25 bp, Artificial
  Probe
aaccagcgtagctggggaagacagt

SEQ ID NO: 361758 - DNA, 25 bp, Artificial
  Probe
ggctgccggcctgtaaccagcgtag

SEQ ID NO: 361759 - DNA, 25 bp, Artificial
  Probe
aggcctgcctggacacatgtgcccg

SEQ ID NO: 361760 - DNA, 25 bp, Artificial
  Probe
ggctaagctataccaccatcagcac

SEQ ID NO: 361761 - DNA, 25 bp, Artificial
  Probe
tggggcagcaccagggcctgtccac

SEQ ID NO: 361762 - DNA, 25 bp, Artificial
  Probe
cgctgtccaggctaagctataccac

SEQ ID NO: 361763 - DNA, 25 bp, Artificial
  Probe
acaataattctcacgtgtgagccag

SEQ ID NO: 361764 - DNA, 25 bp, Artificial
  Probe
atcttttctggtacagacagactaa

SEQ ID NO: 361765 - DNA, 25 bp, Artificial
  Probe
cagtttcaggccacaatgatctttt

SEQ ID NO: 361766 - DNA, 25 bp, Artificial
  Probe
acttccgcaacaagtctcctatgga

SEQ ID NO: 361767 - DNA, 25 bp, Artificial
  Probe
gattcaacctacagaaccccaggac

SEQ ID NO: 361768 - DNA, 25 bp, Artificial
  Probe
caacaagtctcctatggaggatgca

SEQ ID NO: 361769 - DNA, 25 bp, Artificial
  Probe
aggacaaacaataattctcacgtgt

SEQ ID NO: 361770 - DNA, 25 bp, Artificial
  Probe
tctgtgtgccagcagccccgggact

SEQ ID NO: 361771 - DNA, 25 bp, Artificial
  Probe
gctgaagattcaacctacagaaccc

SEQ ID NO: 361772 - DNA, 25 bp, Artificial
  Probe
aaggggctagagttgctgagctact

SEQ ID NO: 361773 - DNA, 25 bp, Artificial
  Probe
acaatgatcttttctggtacagaca

SEQ ID NO: 361774 - DNA, 25 bp, Artificial
  Probe
actcaaggatcgattcacagctgag

SEQ ID NO: 361775 - DNA, 25 bp, Artificial
  Probe
ctatggaggatgcaggggcactcaa

SEQ ID NO: 361776 - DNA, 25 bp, Artificial
  Probe
caaacaataattctcacgtgtgagc

SEQ ID NO: 361777 - DNA, 25 bp, Artificial
  Probe
ttctcacgtgtgagccagtttcagg

SEQ ID NO: 361778 - DNA, 25 bp, Artificial
  Probe
tcctatggaggatgcaggggcactc

SEQ ID NO: 361779 - DNA, 25 bp, Artificial
  Probe
tcacagctgagattcaagattcatc

SEQ ID NO: 361780 - DNA, 25 bp, Artificial
  Probe
agcagccccgggactccgatctatg

SEQ ID NO: 361781 - DNA, 25 bp, Artificial
  Probe
cacgctgaagattcaacctacagaa

SEQ ID NO: 361782 - DNA, 25 bp, Artificial
  Probe
gacaaacaataattctcacgtgtga

SEQ ID NO: 361783 - DNA, 25 bp, Artificial
  Probe
agattcaacctacagaaccccagga

SEQ ID NO: 361784 - DNA, 25 bp, Artificial
  Probe
tacttccgcaacaagtctcctatgg

SEQ ID NO: 361785 - DNA, 25 bp, Artificial
  Probe
tccacgctgaagattcaacctacag

SEQ ID NO: 361786 - DNA, 25 bp, Artificial
  Probe
cagccccgggactccgatctatgag

SEQ ID NO: 361787 - DNA, 25 bp, Artificial
  Probe
ctcctatggaggatgcaggggcact

SEQ ID NO: 361788 - DNA, 25 bp, Artificial
  Probe
cacgtgtgagccagtttcaggccac

SEQ ID NO: 361789 - DNA, 25 bp, Artificial
  Probe
gaagattcaacctacagaaccccag

SEQ ID NO: 361790 - DNA, 25 bp, Artificial
  Probe
tgagccagtttcaggccacaatgat

SEQ ID NO: 361791 - DNA, 25 bp, Artificial
  Probe
aggatcgattcacagctgagattca

SEQ ID NO: 361792 - DNA, 25 bp, Artificial
  Probe
cccagacatgaggtagcagagaaag

SEQ ID NO: 361793 - DNA, 25 bp, Artificial
  Probe
ctggtacagacagactaagataaag

SEQ ID NO: 361794 - DNA, 25 bp, Artificial
  Probe
ctacagaaccccaggactcagctgt

SEQ ID NO: 361795 - DNA, 25 bp, Artificial
  Probe
caataattctcacgtgtgagccagt

SEQ ID NO: 361796 - DNA, 25 bp, Artificial
  Probe
gatgcaggggcactcaaggatcgat

SEQ ID NO: 361797 - DNA, 25 bp, Artificial
  Probe
agattcatccatctccacgctgaag

SEQ ID NO: 361798 - DNA, 25 bp, Artificial
  Probe
gctagagttgctgagctacttccgc

SEQ ID NO: 361799 - DNA, 25 bp, Artificial
  Probe
gatcgattcacagctgagattcaag

SEQ ID NO: 361800 - DNA, 25 bp, Artificial
  Probe
tgctgagctacttccgcaacaagtc

SEQ ID NO: 361801 - DNA, 25 bp, Artificial
  Probe
tacagaaccccaggactcagctgtg

SEQ ID NO: 361802 - DNA, 25 bp, Artificial
  Probe
cgctgaagattcaacctacagaacc

SEQ ID NO: 361803 - DNA, 25 bp, Artificial
  Probe
taattctcacgtgtgagccagtttc

SEQ ID NO: 361804 - DNA, 25 bp, Artificial
  Probe
cgtgtgagccagtttcaggccacaa

SEQ ID NO: 361805 - DNA, 25 bp, Artificial
  Probe
cccgggactccgatctatgagcagt

SEQ ID NO: 361806 - DNA, 25 bp, Artificial
  Probe
acaagtctcctatggaggatgcagg

SEQ ID NO: 361807 - DNA, 25 bp, Artificial
  Probe
tatctgtgtgccagcagccccggga

SEQ ID NO: 361808 - DNA, 25 bp, Artificial
  Probe
aaaggggctagagttgctgagctac

SEQ ID NO: 361809 - DNA, 25 bp, Artificial
  Probe
aggtattggacaagcaccagttagg

SEQ ID NO: 361810 - DNA, 25 bp, Artificial
  Probe
ttgtcctggaagctaaaaacctgaa

SEQ ID NO: 361811 - DNA, 25 bp, Artificial
  Probe
ccatccatgccaggacagcaggtat

SEQ ID NO: 361812 - DNA, 25 bp, Artificial
  Probe
ccaagcccaagtccatcttcaggaa

SEQ ID NO: 361813 - DNA, 25 bp, Artificial
  Probe
tacctccacattggaaatgtttccg

SEQ ID NO: 361814 - DNA, 25 bp, Artificial
  Probe
gcagcgttggacctaggaggttcct

SEQ ID NO: 361815 - DNA, 25 bp, Artificial
  Probe
ctcctatacccagaaaccacagtgg

SEQ ID NO: 361816 - DNA, 25 bp, Artificial
  Probe
ggccgggaagctcaccgtcattgtc

SEQ ID NO: 361817 - DNA, 25 bp, Artificial
  Probe
ctgggccggagttacatagataagg

SEQ ID NO: 361818 - DNA, 25 bp, Artificial
  Probe
ccatacgtggaactaggaggtagag

SEQ ID NO: 361819 - DNA, 25 bp, Artificial
  Probe
tgggctgacatgttggccaacccta

SEQ ID NO: 361820 - DNA, 25 bp, Artificial
  Probe
gagtcaggcccaagcccaagtccat

SEQ ID NO: 361821 - DNA, 25 bp, Artificial
  Probe
ctatgagttcagtgaacctggggcg

SEQ ID NO: 361822 - DNA, 25 bp, Artificial
  Probe
cgcaacgatgccatcggagaggtgc

SEQ ID NO: 361823 - DNA, 25 bp, Artificial
  Probe
tgctccagggaggtaaaaaggttcg

SEQ ID NO: 361824 - DNA, 25 bp, Artificial
  Probe
agcttgacccctgtgctgctcctgg

SEQ ID NO: 361825 - DNA, 25 bp, Artificial
  Probe
ttggccaaccctaggcggcccattg

SEQ ID NO: 361826 - DNA, 25 bp, Artificial
  Probe
gcgagagctgcaggtggctcccaaa

SEQ ID NO: 361827 - DNA, 25 bp, Artificial
  Probe
catagataaggttcagcctgaaata

SEQ ID NO: 361828 - DNA, 25 bp, Artificial
  Probe
ccagacaagcggaggcgacatgaga

SEQ ID NO: 361829 - DNA, 25 bp, Artificial
  Probe
ttatgacttccagactggccagctc

SEQ ID NO: 361830 - DNA, 25 bp, Artificial
  Probe
cgactgcagtattcactggattatg

SEQ ID NO: 361831 - DNA, 25 bp, Artificial
  Probe
ggatatctgcttctctctccggtat

SEQ ID NO: 361832 - DNA, 25 bp, Artificial
  Probe
tcagctttgaggtgccctgtgacca

SEQ ID NO: 361833 - DNA, 25 bp, Artificial
  Probe
ggcctacggcactgggctgacatgt

SEQ ID NO: 361834 - DNA, 25 bp, Artificial
  Probe
tcttgcaagctgagggactggcagc

SEQ ID NO: 361835 - DNA, 25 bp, Artificial
  Probe
ccaggacagcaggtattggacaagc

SEQ ID NO: 361836 - DNA, 25 bp, Artificial
  Probe
ctgattcccgtcaagcaagcacctg

SEQ ID NO: 361837 - DNA, 25 bp, Artificial
  Probe
cagaaaccacagtggtcctgcgggg

SEQ ID NO: 361838 - DNA, 25 bp, Artificial
  Probe
gagctgggccggagttacatagata

SEQ ID NO: 361839 - DNA, 25 bp, Artificial
  Probe
tgtaggaggactctcagacccttat

SEQ ID NO: 361840 - DNA, 25 bp, Artificial
  Probe
tgcgggtgcctatgagttcagtgaa

SEQ ID NO: 361841 - DNA, 25 bp, Artificial
  Probe
agagtcctaccctctgctttgacaa

SEQ ID NO: 361842 - DNA, 25 bp, Artificial
  Probe
gtcaagcaagcacctgaccccagat

SEQ ID NO: 361843 - DNA, 25 bp, Artificial
  Probe
ctggcctacggcactgggctgacat

SEQ ID NO: 361844 - DNA, 25 bp, Artificial
  Probe
catcttcaggaagtgaaggagctgg

SEQ ID NO: 361845 - DNA, 25 bp, Artificial
  Probe
ttcgatcgcttctcccgcaacgatg

SEQ ID NO: 361846 - DNA, 25 bp, Artificial
  Probe
ctgaccgttttggactatgacaaac

SEQ ID NO: 361847 - DNA, 25 bp, Artificial
  Probe
cctgacagagccaggccaatacctg

SEQ ID NO: 361848 - DNA, 25 bp, Artificial
  Probe
cacggccgggaagctcaccgtcatt

SEQ ID NO: 361849 - DNA, 25 bp, Artificial
  Probe
gtgaagcctctgatctcctttctcc

SEQ ID NO: 361850 - DNA, 25 bp, Artificial
  Probe
gagagctgcaggtggctcccaaaga

SEQ ID NO: 361851 - DNA, 25 bp, Artificial
  Probe
gttcagcctgaaatagaggaactgg

SEQ ID NO: 361852 - DNA, 25 bp, Artificial
  Probe
gaaatgtttccgacttccagtacca

SEQ ID NO: 361853 - DNA, 25 bp, Artificial
  Probe
aggccttcagctttgaggtgccctg

SEQ ID NO: 361854 - DNA, 25 bp, Artificial
  Probe
caagcggaggcgacatgagaccaag

SEQ ID NO: 361855 - DNA, 25 bp, Artificial
  Probe
aagctttcaaatccatttgaaggaa

SEQ ID NO: 361856 - DNA, 25 bp, Artificial
  Probe
agctgagatgcgttactgctttgaa

SEQ ID NO: 361857 - DNA, 25 bp, Artificial
  Probe
tcagaccgctggtgggacagtagct

SEQ ID NO: 361858 - DNA, 25 bp, Artificial
  Probe
gacagacaggcagtatctaaactgg

SEQ ID NO: 361859 - DNA, 25 bp, Artificial
  Probe
attccattgttctttgtactgtagc

SEQ ID NO: 361860 - DNA, 25 bp, Artificial
  Probe
agtaagctttcaaatccatttgaag

SEQ ID NO: 361861 - DNA, 25 bp, Artificial
  Probe
taaccgaattcattcaaatcgtgtg

SEQ ID NO: 361862 - DNA, 25 bp, Artificial
  Probe
aattccctggtgctattccattgtt

SEQ ID NO: 361863 - DNA, 25 bp, Artificial
  Probe
cagtatctaaactgggcaatgcctg

SEQ ID NO: 361864 - DNA, 25 bp, Artificial
  Probe
ttgatgttagccactgcaagtaagc

SEQ ID NO: 361865 - DNA, 25 bp, Artificial
  Probe
aggtgtcacggatcttgtgaacttt

SEQ ID NO: 361866 - DNA, 25 bp, Artificial
  Probe
gtaggttcgacctttcctgtgggag

SEQ ID NO: 361867 - DNA, 25 bp, Artificial
  Probe
tctaaactgggcaatgcctgtcttt

SEQ ID NO: 361868 - DNA, 25 bp, Artificial
  Probe
aatgagagtaacttcttccaaccag

SEQ ID NO: 361869 - DNA, 25 bp, Artificial
  Probe
agacagacaggcagtatctaaactg

SEQ ID NO: 361870 - DNA, 25 bp, Artificial
  Probe
taaactgggcaatgcctgtctttgt

SEQ ID NO: 361871 - DNA, 25 bp, Artificial
  Probe
ctgggcaatgcctgtctttgtaatt

SEQ ID NO: 361872 - DNA, 25 bp, Artificial
  Probe
aggcagacagacaggcagtatctaa

SEQ ID NO: 361873 - DNA, 25 bp, Artificial
  Probe
gagagtaacttcttccaaccagctt

SEQ ID NO: 361874 - DNA, 25 bp, Artificial
  Probe
tgagtctgtttaaccgaattcattc

SEQ ID NO: 361875 - DNA, 25 bp, Artificial
  Probe
tgagtgtccttacctgctaaatatt

SEQ ID NO: 361876 - DNA, 25 bp, Artificial
  Probe
ggtgctattccattgttctttgtac

SEQ ID NO: 361877 - DNA, 25 bp, Artificial
  Probe
aaggcagacagacaggcagtatcta

SEQ ID NO: 361878 - DNA, 25 bp, Artificial
  Probe
tcatttgatgttagccactgcaagt

SEQ ID NO: 361879 - DNA, 25 bp, Artificial
  Probe
tgctaaagcatgagtgtccttacct

SEQ ID NO: 361880 - DNA, 25 bp, Artificial
  Probe
gaatgcttagtaactgcctttaact

SEQ ID NO: 361881 - DNA, 25 bp, Artificial
  Probe
gccactgcaagtaagctttcaaatc

SEQ ID NO: 361882 - DNA, 25 bp, Artificial
  Probe
tccctggtgctattccattgttctt

SEQ ID NO: 361883 - DNA, 25 bp, Artificial
  Probe
aagtttgctaaagcatgagtgtcct

SEQ ID NO: 361884 - DNA, 25 bp, Artificial
  Probe
aactatcatttgatgttagccactg

SEQ ID NO: 361885 - DNA, 25 bp, Artificial
  Probe
ttagaaattccctggtgctattcca

SEQ ID NO: 361886 - DNA, 25 bp, Artificial
  Probe
aatattacatctcgatgtaggttcg

SEQ ID NO: 361887 - DNA, 25 bp, Artificial
  Probe
gaaactcaattctgagtctgtttaa

SEQ ID NO: 361888 - DNA, 25 bp, Artificial
  Probe
tgaatgcttagtaactgcctttaac

SEQ ID NO: 361889 - DNA, 25 bp, Artificial
  Probe
ctttgcttggttagccgagaagaat

SEQ ID NO: 361890 - DNA, 25 bp, Artificial
  Probe
acaggcagtatctaaactgggcaat

SEQ ID NO: 361891 - DNA, 25 bp, Artificial
  Probe
cacggatcttgtgaactttttagaa

SEQ ID NO: 361892 - DNA, 25 bp, Artificial
  Probe
ctttttagaaattccctggtgctat

SEQ ID NO: 361893 - DNA, 25 bp, Artificial
  Probe
acacagctgagatgcgttactgctt

SEQ ID NO: 361894 - DNA, 25 bp, Artificial
  Probe
caatgcctgtctttgtaattaatga

SEQ ID NO: 361895 - DNA, 25 bp, Artificial
  Probe
actcaattctgagtctgtttaaccg

SEQ ID NO: 361896 - DNA, 25 bp, Artificial
  Probe
cttggttagccgagaagaatgatca

SEQ ID NO: 361897 - DNA, 25 bp, Artificial
  Probe
tcgtgtgctactgtaatacccaacc

SEQ ID NO: 361898 - DNA, 25 bp, Artificial
  Probe
caggcagtatctaaactgggcaatg

SEQ ID NO: 361899 - DNA, 25 bp, Artificial
  Probe
gcagtatctaaactgggcaatgcct

SEQ ID NO: 361900 - DNA, 25 bp, Artificial
  Probe
tgggggctctgctttctttgcttgg

SEQ ID NO: 361901 - DNA, 25 bp, Artificial
  Probe
atagtgcactgcagtgatggtgcag

SEQ ID NO: 361902 - DNA, 25 bp, Artificial
  Probe
aagcggagccaaacacctgtgccac

SEQ ID NO: 361903 - DNA, 25 bp, Artificial
  Probe
gagagtggctgcactgtcatcgtta

SEQ ID NO: 361904 - DNA, 25 bp, Artificial
  Probe
cggccgctgctggacttccgcagga

SEQ ID NO: 361905 - DNA, 25 bp, Artificial
  Probe
ggcaacatcaagaagaaccgccatc

SEQ ID NO: 361906 - DNA, 25 bp, Artificial
  Probe
cgaaacaacgggataaggagcgcct

SEQ ID NO: 361907 - DNA, 25 bp, Artificial
  Probe
tggaggatcacctccggaaccggga

SEQ ID NO: 361908 - DNA, 25 bp, Artificial
  Probe
actggccggatgaagggtcctccct

SEQ ID NO: 361909 - DNA, 25 bp, Artificial
  Probe
tcccagttcagtgacgcggcccagg

SEQ ID NO: 361910 - DNA, 25 bp, Artificial
  Probe
ctgtgccaccgcacaaggtgaaggc

SEQ ID NO: 361911 - DNA, 25 bp, Artificial
  Probe
ccctctcggagtgattacatcaacg

SEQ ID NO: 361912 - DNA, 25 bp, Artificial
  Probe
gctccagattttgcagacaggggtg

SEQ ID NO: 361913 - DNA, 25 bp, Artificial
  Probe
agcagcacaccgtcctggtgcgagg

SEQ ID NO: 361914 - DNA, 25 bp, Artificial
  Probe
gaagaaccgccatcctgacttctta

SEQ ID NO: 361915 - DNA, 25 bp, Artificial
  Probe
accgcacaaggtgaaggcaacatca

SEQ ID NO: 361916 - DNA, 25 bp, Artificial
  Probe
ttgagtttgcgctgacagccgtggc

SEQ ID NO: 361917 - DNA, 25 bp, Artificial
  Probe
ggaggacaggcacctacatccttat

SEQ ID NO: 361918 - DNA, 25 bp, Artificial
  Probe
ggtgtcaaacagtgtgaccgctact

SEQ ID NO: 361919 - DNA, 25 bp, Artificial
  Probe
accctatgaccatgcccgaatcaag

SEQ ID NO: 361920 - DNA, 25 bp, Artificial
  Probe
agaggccgctcctgtcccatcatag

SEQ ID NO: 361921 - DNA, 25 bp, Artificial
  Probe
cacttcctcagctggccggcagagg

SEQ ID NO: 361922 - DNA, 25 bp, Artificial
  Probe
ttggccaagaagtggcaggccctgt

SEQ ID NO: 361923 - DNA, 25 bp, Artificial
  Probe
gaagtctgaactggaagcgcagaca

SEQ ID NO: 361924 - DNA, 25 bp, Artificial
  Probe
cttccgcaggaaagtgaacaagtgc

SEQ ID NO: 361925 - DNA, 25 bp, Artificial
  Probe
cacaccatcgcagacttctggcaga

SEQ ID NO: 361926 - DNA, 25 bp, Artificial
  Probe
ggggcccacggtgacactacttttg

SEQ ID NO: 361927 - DNA, 25 bp, Artificial
  Probe
atgaccctcggatgccggcctacat

SEQ ID NO: 361928 - DNA, 25 bp, Artificial
  Probe
ggcatatctcccatgcgctcattgc

SEQ ID NO: 361929 - DNA, 25 bp, Artificial
  Probe
caggccaacatggacatctccacag

SEQ ID NO: 361930 - DNA, 25 bp, Artificial
  Probe
gatgccggcctacatagccacacag

SEQ ID NO: 361931 - DNA, 25 bp, Artificial
  Probe
tcctgtcccatcatagtgcactgca

SEQ ID NO: 361932 - DNA, 25 bp, Artificial
  Probe
atcaagctgaaagtggagagcagcc

SEQ ID NO: 361933 - DNA, 25 bp, Artificial
  Probe
cgtcctggtgcgaggagcctgccca

SEQ ID NO: 361934 - DNA, 25 bp, Artificial
  Probe
gattgatatcgctgccaccctggag

SEQ ID NO: 361935 - DNA, 25 bp, Artificial
  Probe
gcggtggccctgtgtatgcgccatc

SEQ ID NO: 361936 - DNA, 25 bp, Artificial
  Probe
aagcccatggcatatctcccatgcg

SEQ ID NO: 361937 - DNA, 25 bp, Artificial
  Probe
ccctggcaggtgtcgctgggctact

SEQ ID NO: 361938 - DNA, 25 bp, Artificial
  Probe
tactgaatcgcatggcgaaaggagt

SEQ ID NO: 361939 - DNA, 25 bp, Artificial
  Probe
tgcttactctggtggccctggcagg

SEQ ID NO: 361940 - DNA, 25 bp, Artificial
  Probe
caggagacgcgcacgctcactcagt

SEQ ID NO: 361941 - DNA, 25 bp, Artificial
  Probe
agtgaacaagtgctacagaggccgc

SEQ ID NO: 361942 - DNA, 25 bp, Artificial
  Probe
atcgttatgctgacccctttggtgg

SEQ ID NO: 361943 - DNA, 25 bp, Artificial
  Probe
gaggtgaatgccatcctcaaggccc

SEQ ID NO: 361944 - DNA, 25 bp, Artificial
  Probe
ctgggctactagtagctttggcggt

SEQ ID NO: 361945 - DNA, 25 bp, Artificial
  Probe
aagctgggctggtgaagtctgaact

SEQ ID NO: 361946 - DNA, 25 bp, Artificial
  Probe
ccctctaccacgtctatgaggtgaa

SEQ ID NO: 361947 - DNA, 25 bp, Artificial
  Probe
agaagcttccaagccacttgtgagc

SEQ ID NO: 361948 - DNA, 25 bp, Artificial
  Probe
cactcagggtttggaggcggacggg

SEQ ID NO: 361949 - DNA, 25 bp, Artificial
  Probe
acccagaagcttccaagccacttgt

SEQ ID NO: 361950 - DNA, 25 bp, Artificial
  Probe
gagcccactcagggtttggaggcgg

SEQ ID NO: 361951 - DNA, 25 bp, Artificial
  Probe
cacttgtgagcccactcagggtttg

SEQ ID NO: 361952 - DNA, 25 bp, Artificial
  Probe
aagcttccaagccacttgtgagccc

SEQ ID NO: 361953 - DNA, 25 bp, Artificial
  Probe
acttgtgagcccactcagggtttgg

SEQ ID NO: 361954 - DNA, 25 bp, Artificial
  Probe
tccaagccacttgtgagcccactca

SEQ ID NO: 361955 - DNA, 25 bp, Artificial
  Probe
gacccagaagcttccaagccacttg

SEQ ID NO: 361956 - DNA, 25 bp, Artificial
  Probe
agcccactcagggtttggaggcgga

SEQ ID NO: 361957 - DNA, 25 bp, Artificial
  Probe
ttccaagccacttgtgagcccactc

SEQ ID NO: 361958 - DNA, 25 bp, Artificial
  Probe
ccagaagcttccaagccacttgtga

SEQ ID NO: 361959 - DNA, 25 bp, Artificial
  Probe
cttccaagccacttgtgagcccact

SEQ ID NO: 361960 - DNA, 25 bp, Artificial
  Probe
tgtgagcccactcagggtttggagg

SEQ ID NO: 361961 - DNA, 25 bp, Artificial
  Probe
caagccacttgtgagcccactcagg

SEQ ID NO: 361962 - DNA, 25 bp, Artificial
  Probe
gcccactcagggtttggaggcggac

SEQ ID NO: 361963 - DNA, 25 bp, Artificial
  Probe
gaagcttccaagccacttgtgagcc

SEQ ID NO: 361964 - DNA, 25 bp, Artificial
  Probe
ccaagccacttgtgagcccactcag

SEQ ID NO: 361965 - DNA, 25 bp, Artificial
  Probe
cccactcagggtttggaggcggacg

SEQ ID NO: 361966 - DNA, 25 bp, Artificial
  Probe
agcttccaagccacttgtgagccca

SEQ ID NO: 361967 - DNA, 25 bp, Artificial
  Probe
tgagcccactcagggtttggaggcg

SEQ ID NO: 361968 - DNA, 25 bp, Artificial
  Probe
gtgagcccactcagggtttggaggc

SEQ ID NO: 361969 - DNA, 25 bp, Artificial
  Probe
aagccacttgtgagcccactcaggg

SEQ ID NO: 361970 - DNA, 25 bp, Artificial
  Probe
gccacttgtgagcccactcagggtt

SEQ ID NO: 361971 - DNA, 25 bp, Artificial
  Probe
ccacttgtgagcccactcagggttt

SEQ ID NO: 361972 - DNA, 25 bp, Artificial
  Probe
ccactcagggtttggaggcggacgg

SEQ ID NO: 361973 - DNA, 25 bp, Artificial
  Probe
cagaagcttccaagccacttgtgag

SEQ ID NO: 361974 - DNA, 25 bp, Artificial
  Probe
gcttccaagccacttgtgagcccac

SEQ ID NO: 361975 - DNA, 25 bp, Artificial
  Probe
tcagggtttggaggcggacggggtg

SEQ ID NO: 361976 - DNA, 25 bp, Artificial
  Probe
cttgtgagcccactcagggtttgga

SEQ ID NO: 361977 - DNA, 25 bp, Artificial
  Probe
cccagaagcttccaagccacttgtg

SEQ ID NO: 361978 - DNA, 25 bp, Artificial
  Probe
agccacttgtgagcccactcagggt

SEQ ID NO: 361979 - DNA, 25 bp, Artificial
  Probe
ttgtgagcccactcagggtttggag

SEQ ID NO: 361980 - DNA, 25 bp, Artificial
  Probe
aggccagctggagatttaacaatga

SEQ ID NO: 361981 - DNA, 25 bp, Artificial
  Probe
cactttgacagtgtaagctaggaca

SEQ ID NO: 361982 - DNA, 25 bp, Artificial
  Probe
agggtcaacaggtcacagaccataa

SEQ ID NO: 361983 - DNA, 25 bp, Artificial
  Probe
cagaccataaaagaacacaggttgg

SEQ ID NO: 361984 - DNA, 25 bp, Artificial
  Probe
tcaagtacgccaagtgtatgtgtgg

SEQ ID NO: 361985 - DNA, 25 bp, Artificial
  Probe
aacacaggttggtacctagacagag

SEQ ID NO: 361986 - DNA, 25 bp, Artificial
  Probe
agtcactttgacagtgtaagctagg

SEQ ID NO: 361987 - DNA, 25 bp, Artificial
  Probe
tcacagaccataaaagaacacaggt

SEQ ID NO: 361988 - DNA, 25 bp, Artificial
  Probe
ggaggccagctggagatttaacaat

SEQ ID NO: 361989 - DNA, 25 bp, Artificial
  Probe
caggtcacagaccataaaagaacac

SEQ ID NO: 361990 - DNA, 25 bp, Artificial
  Probe
tacctagacagaggtaagaaggctg

SEQ ID NO: 361991 - DNA, 25 bp, Artificial
  Probe
acaatgtgttgttgccctcagggga

SEQ ID NO: 361992 - DNA, 25 bp, Artificial
  Probe
caagtacgccaagtgtatgtgtggg

SEQ ID NO: 361993 - DNA, 25 bp, Artificial
  Probe
acacaggttggtacctagacagagg

SEQ ID NO: 361994 - DNA, 25 bp, Artificial
  Probe
aagggtcaacaggtcacagaccata

SEQ ID NO: 361995 - DNA, 25 bp, Artificial
  Probe
actttgacagtgtaagctaggacac

SEQ ID NO: 361996 - DNA, 25 bp, Artificial
  Probe
gtacctagacagaggtaagaaggct

SEQ ID NO: 361997 - DNA, 25 bp, Artificial
  Probe
caggttggtacctagacagaggtaa

SEQ ID NO: 361998 - DNA, 25 bp, Artificial
  Probe
accacacaatgtgttgttgccctca

SEQ ID NO: 361999 - DNA, 25 bp, Artificial
  Probe
ggtacctagacagaggtaagaaggc

SEQ ID NO: 362000 - DNA, 25 bp, Artificial
  Probe
agaacacaggttggtacctagacag

SEQ ID NO: 362001 - DNA, 25 bp, Artificial
  Probe
acaggttggtacctagacagaggta

SEQ ID NO: 362002 - DNA, 25 bp, Artificial
  Probe
gaacacaggttggtacctagacaga

SEQ ID NO: 362003 - DNA, 25 bp, Artificial
  Probe
atggaggccagctggagatttaaca

SEQ ID NO: 362004 - DNA, 25 bp, Artificial
  Probe
ggtcaacaggtcacagaccataaaa

SEQ ID NO: 362005 - DNA, 25 bp, Artificial
  Probe
gaggccagctggagatttaacaatg

SEQ ID NO: 362006 - DNA, 25 bp, Artificial
  Probe
ccctaccacacaatgtgttgttgcc

SEQ ID NO: 362007 - DNA, 25 bp, Artificial
  Probe
ggtcacagaccataaaagaacacag

SEQ ID NO: 362008 - DNA, 25 bp, Artificial
  Probe
agaccataaaagaacacaggttggt

SEQ ID NO: 362009 - DNA, 25 bp, Artificial
  Probe
cctaccacacaatgtgttgttgccc

SEQ ID NO: 362010 - DNA, 25 bp, Artificial
  Probe
cacacaatgtgttgttgccctcagg

SEQ ID NO: 362011 - DNA, 25 bp, Artificial
  Probe
ggtgggtcaagtacgccaagtgtat

SEQ ID NO: 362012 - DNA, 25 bp, Artificial
  Probe
aatggaggccagctggagatttaac

SEQ ID NO: 362013 - DNA, 25 bp, Artificial
  Probe
cacaggttggtacctagacagaggt

SEQ ID NO: 362014 - DNA, 25 bp, Artificial
  Probe
aagtcactttgacagtgtaagctag

SEQ ID NO: 362015 - DNA, 25 bp, Artificial
  Probe
acacaatgtgttgttgccctcaggg

SEQ ID NO: 362016 - DNA, 25 bp, Artificial
  Probe
cacaatgtgttgttgccctcagggg

SEQ ID NO: 362017 - DNA, 25 bp, Artificial
  Probe
ctaccacacaatgtgttgttgccct

SEQ ID NO: 362018 - DNA, 25 bp, Artificial
  Probe
ccacacaatgtgttgttgccctcag

SEQ ID NO: 362019 - DNA, 25 bp, Artificial
  Probe
gtcaagtacgccaagtgtatgtgtg

SEQ ID NO: 362020 - DNA, 25 bp, Artificial
  Probe
gtcaacaggtcacagaccataaaag

SEQ ID NO: 362021 - DNA, 25 bp, Artificial
  Probe
cacagaccataaaagaacacaggtt

SEQ ID NO: 362022 - DNA, 25 bp, Artificial
  Probe
ctttgacagtgtaagctaggacacg

SEQ ID NO: 362023 - DNA, 25 bp, Artificial
  Probe
aaagtcactttgacagtgtaagcta

SEQ ID NO: 362024 - DNA, 25 bp, Artificial
  Probe
tttgacagtgtaagctaggacacgg

SEQ ID NO: 362025 - DNA, 25 bp, Artificial
  Probe
tcaacaggtcacagaccataaaaga

SEQ ID NO: 362026 - DNA, 25 bp, Artificial
  Probe
tgtgctcctgaagaaggaatcctct

SEQ ID NO: 362027 - DNA, 25 bp, Artificial
  Probe
ggagtagcgatcaactcaaggtcca

SEQ ID NO: 362028 - DNA, 25 bp, Artificial
  Probe
ctataatgcgcaaatggatactgac

SEQ ID NO: 362029 - DNA, 25 bp, Artificial
  Probe
ttattcatggacacccggggcactg

SEQ ID NO: 362030 - DNA, 25 bp, Artificial
  Probe
gcaactggccttgttccgaccggtt

SEQ ID NO: 362031 - DNA, 25 bp, Artificial
  Probe
aaggatatacccatcaactgtgctc

SEQ ID NO: 362032 - DNA, 25 bp, Artificial
  Probe
ccggtttctacaaggatatacccat

SEQ ID NO: 362033 - DNA, 25 bp, Artificial
  Probe
agcagcaaatgcacggcagcaactg

SEQ ID NO: 362034 - DNA, 25 bp, Artificial
  Probe
ctgttttaaatgagctttcgacatt

SEQ ID NO: 362035 - DNA, 25 bp, Artificial
  Probe
agatgttgacatcttctgtggaagc

SEQ ID NO: 362036 - DNA, 25 bp, Artificial
  Probe
ttcgaacagaagtcaagcagcaaat

SEQ ID NO: 362037 - DNA, 25 bp, Artificial
  Probe
tgacctaggagtagcgatcaactca

SEQ ID NO: 362038 - DNA, 25 bp, Artificial
  Probe
agaaggaatcctcttattggcatca

SEQ ID NO: 362039 - DNA, 25 bp, Artificial
  Probe
ctacgtgcaaagtggcaaagatgtt

SEQ ID NO: 362040 - DNA, 25 bp, Artificial
  Probe
catcttctgtggaagctgttttaaa

SEQ ID NO: 362041 - DNA, 25 bp, Artificial
  Probe
gttctcattatgttattcatggaca

SEQ ID NO: 362042 - DNA, 25 bp, Artificial
  Probe
tcacactgagatgttagactattta

SEQ ID NO: 362043 - DNA, 25 bp, Artificial
  Probe
cacggcagcaactggccttgttccg

SEQ ID NO: 362044 - DNA, 25 bp, Artificial
  Probe
aatcaatctccagttcacagacagg

SEQ ID NO: 362045 - DNA, 25 bp, Artificial
  Probe
tcattatgttattcatggacacccg

SEQ ID NO: 362046 - DNA, 25 bp, Artificial
  Probe
tctataatgcgcaaatggatactga

SEQ ID NO: 362047 - DNA, 25 bp, Artificial
  Probe
tccgaccggtttctacaaggatata

SEQ ID NO: 362048 - DNA, 25 bp, Artificial
  Probe
atagcaactggaatgaatggtgccg

SEQ ID NO: 362049 - DNA, 25 bp, Artificial
  Probe
cttattggcatcagaagctaaaaga

SEQ ID NO: 362050 - DNA, 25 bp, Artificial
  Probe
gcgaggaccttttctcaaatcaatc

SEQ ID NO: 362051 - DNA, 25 bp, Artificial
  Probe
ttaaatgagctttcgacatttggtc

SEQ ID NO: 362052 - DNA, 25 bp, Artificial
  Probe
gatcaactcaaggtccagttctcat

SEQ ID NO: 362053 - DNA, 25 bp, Artificial
  Probe
gacacccggggcactgctctataat

SEQ ID NO: 362054 - DNA, 25 bp, Artificial
  Probe
aggaggcccatgacctaggagtagc

SEQ ID NO: 362055 - DNA, 25 bp, Artificial
  Probe
gatgtctctccactaatgcatagct

SEQ ID NO: 362056 - DNA, 25 bp, Artificial
  Probe
actgctctataatgcgcaaatggat

SEQ ID NO: 362057 - DNA, 25 bp, Artificial
  Probe
ctaacaagatagcaactggaatgaa

SEQ ID NO: 362058 - DNA, 25 bp, Artificial
  Probe
aagagcgaggaccttttctcaaatc

SEQ ID NO: 362059 - DNA, 25 bp, Artificial
  Probe
aatggtgccgttttcttgtgatgtc

SEQ ID NO: 362060 - DNA, 25 bp, Artificial
  Probe
cagcaactggccttgttccgaccgg

SEQ ID NO: 362061 - DNA, 25 bp, Artificial
  Probe
agctgtaagtacacggtgtttccta

SEQ ID NO: 362062 - DNA, 25 bp, Artificial
  Probe
atctccagttcacagacaggaggag

SEQ ID NO: 362063 - DNA, 25 bp, Artificial
  Probe
caaatgcacggcagcaactggcctt

SEQ ID NO: 362064 - DNA, 25 bp, Artificial
  Probe
tgttccgaccggtttctacaaggat

SEQ ID NO: 362065 - DNA, 25 bp, Artificial
  Probe
tttcatttcgaacagaagtcaagca

SEQ ID NO: 362066 - DNA, 25 bp, Artificial
  Probe
aatgcatagctcttctgactctacg

SEQ ID NO: 362067 - DNA, 25 bp, Artificial
  Probe
aagtcaagcagcaaatgcacggcag

SEQ ID NO: 362068 - DNA, 25 bp, Artificial
  Probe
aactcaaggtccagttctcattatg

SEQ ID NO: 362069 - DNA, 25 bp, Artificial
  Probe
cctcttattggcatcagaagctaaa

SEQ ID NO: 362070 - DNA, 25 bp, Artificial
  Probe
taagtacacggtgtttcctaacaag

SEQ ID NO: 362071 - DNA, 25 bp, Artificial
  Probe
gaatcctcttattggcatcagaagc

SEQ ID NO: 362072 - DNA, 25 bp, Artificial
  Probe
atcataactggatcatgattttccc

SEQ ID NO: 362073 - DNA, 25 bp, Artificial
  Probe
ttccctcaaggagttctgctgaatt

SEQ ID NO: 362074 - DNA, 25 bp, Artificial
  Probe
ggagttctgctgaattcttcagaaa

SEQ ID NO: 362075 - DNA, 25 bp, Artificial
  Probe
atgacaagtcagtgacagaacagga

SEQ ID NO: 362076 - DNA, 25 bp, Artificial
  Probe
gtacccatctaatataaaggaaatg

SEQ ID NO: 362077 - DNA, 25 bp, Artificial
  Probe
tctgctgaattcttcagaaatgtgg

SEQ ID NO: 362078 - DNA, 25 bp, Artificial
  Probe
ctcaaggagttctgctgaattcttc

SEQ ID NO: 362079 - DNA, 25 bp, Artificial
  Probe
atgattttccctcaaggagttctgc

SEQ ID NO: 362080 - DNA, 25 bp, Artificial
  Probe
tccctcaaggagttctgctgaattc

SEQ ID NO: 362081 - DNA, 25 bp, Artificial
  Probe
gttctgctgaattcttcagaaatgt

SEQ ID NO: 362082 - DNA, 25 bp, Artificial
  Probe
atttttcatgaaaatgtgaactatt

SEQ ID NO: 362083 - DNA, 25 bp, Artificial
  Probe
ctgaattcttcagaaatgtggtgtc

SEQ ID NO: 362084 - DNA, 25 bp, Artificial
  Probe
aaatgacaagtcagtgacagaacag

SEQ ID NO: 362085 - DNA, 25 bp, Artificial
  Probe
ttgatctttctcagtgtctacaatg

SEQ ID NO: 362086 - DNA, 25 bp, Artificial
  Probe
cctcaaggagttctgctgaattctt

SEQ ID NO: 362087 - DNA, 25 bp, Artificial
  Probe
tgtgacaactttaattgtagatttg

SEQ ID NO: 362088 - DNA, 25 bp, Artificial
  Probe
ttctgctgaattcttcagaaatgtg

SEQ ID NO: 362089 - DNA, 25 bp, Artificial
  Probe
tggtgtctaagaacaccagaccctt

SEQ ID NO: 362090 - DNA, 25 bp, Artificial
  Probe
tgtctaagaacaccagaccctttaa

SEQ ID NO: 362091 - DNA, 25 bp, Artificial
  Probe
tcggtacatctttgatctttctcag

SEQ ID NO: 362092 - DNA, 25 bp, Artificial
  Probe
ctgctgaattcttcagaaatgtggt

SEQ ID NO: 362093 - DNA, 25 bp, Artificial
  Probe
gtgtctaagaacaccagacccttta

SEQ ID NO: 362094 - DNA, 25 bp, Artificial
  Probe
tcatgattttccctcaaggagttct

SEQ ID NO: 362095 - DNA, 25 bp, Artificial
  Probe
aatgacaagtcagtgacagaacagg

SEQ ID NO: 362096 - DNA, 25 bp, Artificial
  Probe
tcaaggagttctgctgaattcttca

SEQ ID NO: 362097 - DNA, 25 bp, Artificial
  Probe
aaggagttctgctgaattcttcaga

SEQ ID NO: 362098 - DNA, 25 bp, Artificial
  Probe
ccctcaaggagttctgctgaattct

SEQ ID NO: 362099 - DNA, 25 bp, Artificial
  Probe
tgattttccctcaaggagttctgct

SEQ ID NO: 362100 - DNA, 25 bp, Artificial
  Probe
tgatctttctcagtgtctacaatgt

SEQ ID NO: 362101 - DNA, 25 bp, Artificial
  Probe
attttccctcaaggagttctgctga

SEQ ID NO: 362102 - DNA, 25 bp, Artificial
  Probe
tttagatgcattattctacactaaa

SEQ ID NO: 362103 - DNA, 25 bp, Artificial
  Probe
tgaactattgtgacaactttaattg

SEQ ID NO: 362104 - DNA, 25 bp, Artificial
  Probe
catgattttccctcaaggagttctg

SEQ ID NO: 362105 - DNA, 25 bp, Artificial
  Probe
tgtgaataaacacttctttaaaaat

SEQ ID NO: 362106 - DNA, 25 bp, Artificial
  Probe
aatttttcatgaaaatgtgaactat

SEQ ID NO: 362107 - DNA, 25 bp, Artificial
  Probe
gattttccctcaaggagttctgctg

SEQ ID NO: 362108 - DNA, 25 bp, Artificial
  Probe
aagtcagtgacagaacaggaactta

SEQ ID NO: 362109 - DNA, 25 bp, Artificial
  Probe
tttccctcaaggagttctgctgaat

SEQ ID NO: 362110 - DNA, 25 bp, Artificial
  Probe
ttcttcagaaatgtggtgtctaaga

SEQ ID NO: 362111 - DNA, 25 bp, Artificial
  Probe
ctacactaaatgttacatggaaaaa

SEQ ID NO: 362112 - DNA, 25 bp, Artificial
  Probe
tacactaaatgttacatggaaaaaa

SEQ ID NO: 362113 - DNA, 25 bp, Artificial
  Probe
gagttctgctgaattcttcagaaat

SEQ ID NO: 362114 - DNA, 25 bp, Artificial
  Probe
ctttaatttatgtcatgaataaaat

SEQ ID NO: 362115 - DNA, 25 bp, Artificial
  Probe
cggtacatctttgatctttctcagt

SEQ ID NO: 362116 - DNA, 25 bp, Artificial
  Probe
attcggtacatctttgatctttctc

SEQ ID NO: 362117 - DNA, 25 bp, Artificial
  Probe
aggagttctgctgaattcttcagaa

SEQ ID NO: 362118 - DNA, 25 bp, Artificial
  Probe
gttctctgttcgtcttctacctaga

SEQ ID NO: 362119 - DNA, 25 bp, Artificial
  Probe
ggactatgaccgtattgggttgtca

SEQ ID NO: 362120 - DNA, 25 bp, Artificial
  Probe
ttaactggttcactttccctggact

SEQ ID NO: 362121 - DNA, 25 bp, Artificial
  Probe
gcttttaactggttcactttccctg

SEQ ID NO: 362122 - DNA, 25 bp, Artificial
  Probe
cgtattgggttgtcaggtctttgct

SEQ ID NO: 362123 - DNA, 25 bp, Artificial
  Probe
acccggctatgacacttgctttttt

SEQ ID NO: 362124 - DNA, 25 bp, Artificial
  Probe
gaactgaaactgtagaccaggccag

SEQ ID NO: 362125 - DNA, 25 bp, Artificial
  Probe
ggccagcctcaaactgtgcctgctt

SEQ ID NO: 362126 - DNA, 25 bp, Artificial
  Probe
tgtgcctgcttctgcctcttagttg

SEQ ID NO: 362127 - DNA, 25 bp, Artificial
  Probe
ggttgtcaggtctttgctattttcc

SEQ ID NO: 362128 - DNA, 25 bp, Artificial
  Probe
cttctgcctcttagttgctgaatca

SEQ ID NO: 362129 - DNA, 25 bp, Artificial
  Probe
ctgcctcttagttgctgaatcaagg

SEQ ID NO: 362130 - DNA, 25 bp, Artificial
  Probe
gggttgtcaggtctttgctattttc

SEQ ID NO: 362131 - DNA, 25 bp, Artificial
  Probe
ctgatcaccaccaaacgtattctgg

SEQ ID NO: 362132 - DNA, 25 bp, Artificial
  Probe
agttgctgaatcaaggtatgcacca

SEQ ID NO: 362133 - DNA, 25 bp, Artificial
  Probe
ctgcttctgcctcttagttgctgaa

SEQ ID NO: 362134 - DNA, 25 bp, Artificial
  Probe
tctacttcagtgaatttgttctctg

SEQ ID NO: 362135 - DNA, 25 bp, Artificial
  Probe
gacacttgcttttaactggttcact

SEQ ID NO: 362136 - DNA, 25 bp, Artificial
  Probe
tcagtgaatttgttctctgttcgtc

SEQ ID NO: 362137 - DNA, 25 bp, Artificial
  Probe
caaactgtgcctgcttctgcctctt

SEQ ID NO: 362138 - DNA, 25 bp, Artificial
  Probe
ttctacctagaacagtgcctaatag

SEQ ID NO: 362139 - DNA, 25 bp, Artificial
  Probe
agcccatgacacttgcttttaactg

SEQ ID NO: 362140 - DNA, 25 bp, Artificial
  Probe
ttagttgctgaatcaaggtatgcac

SEQ ID NO: 362141 - DNA, 25 bp, Artificial
  Probe
gaatcaaggtatgcaccaccagcac

SEQ ID NO: 362142 - DNA, 25 bp, Artificial
  Probe
tgtcaggtctttgctattttcctga

SEQ ID NO: 362143 - DNA, 25 bp, Artificial
  Probe
gtcttctacctagaacagtgcctaa

SEQ ID NO: 362144 - DNA, 25 bp, Artificial
  Probe
aatcaaggtatgcaccaccagcacc

SEQ ID NO: 362145 - DNA, 25 bp, Artificial
  Probe
tgttctctgttcgtcttctacctag

SEQ ID NO: 362146 - DNA, 25 bp, Artificial
  Probe
caggtctttgctattttcctgagct

SEQ ID NO: 362147 - DNA, 25 bp, Artificial
  Probe
cagtgaatttgttctctgttcgtct

SEQ ID NO: 362148 - DNA, 25 bp, Artificial
  Probe
ccctggactatgaccgtattgggtt

SEQ ID NO: 362149 - DNA, 25 bp, Artificial
  Probe
gtctttgctattttcctgagctacc

SEQ ID NO: 362150 - DNA, 25 bp, Artificial
  Probe
tctgttcgtcttctacctagaacag

SEQ ID NO: 362151 - DNA, 25 bp, Artificial
  Probe
ctacttcagtgaatttgttctctgt

SEQ ID NO: 362152 - DNA, 25 bp, Artificial
  Probe
cagcacccggctatgacacttgctt

SEQ ID NO: 362153 - DNA, 25 bp, Artificial
  Probe
gttcactttccctggactatgaccg

SEQ ID NO: 362154 - DNA, 25 bp, Artificial
  Probe
ctatgaccgtattgggttgtcaggt

SEQ ID NO: 362155 - DNA, 25 bp, Artificial
  Probe
cttcagtgaatttgttctctgttcg

SEQ ID NO: 362156 - DNA, 25 bp, Artificial
  Probe
aggccagcctcaaactgtgcctgct

SEQ ID NO: 362157 - DNA, 25 bp, Artificial
  Probe
accgtattgggttgtcaggtctttg

SEQ ID NO: 362158 - DNA, 25 bp, Artificial
  Probe
actggttcactttccctggactatg

SEQ ID NO: 362159 - DNA, 25 bp, Artificial
  Probe
gatcaccaccaaacgtattctggat

SEQ ID NO: 362160 - DNA, 25 bp, Artificial
  Probe
gaccgtattgggttgtcaggtcttt

SEQ ID NO: 362161 - DNA, 25 bp, Artificial
  Probe
tgatcaccaccaaacgtattctgga

SEQ ID NO: 362162 - DNA, 25 bp, Artificial
  Probe
actttccctggactatgaccgtatt

SEQ ID NO: 362163 - DNA, 25 bp, Artificial
  Probe
gcacccggctatgacacttgctttt

SEQ ID NO: 362164 - DNA, 25 bp, Artificial
  Probe
gtccagggcagcttgggttacatac

SEQ ID NO: 362165 - DNA, 25 bp, Artificial
  Probe
tgtcctatattgagggtcctatcct

SEQ ID NO: 362166 - DNA, 25 bp, Artificial
  Probe
ctgggacctgggtgttattgacatg

SEQ ID NO: 362167 - DNA, 25 bp, Artificial
  Probe
ggttacatacttttaaactgacctg

SEQ ID NO: 362168 - DNA, 25 bp, Artificial
  Probe
catacttttaaactgacctgtctgg

SEQ ID NO: 362169 - DNA, 25 bp, Artificial
  Probe
ccagttcttggaggaaaagacaggt

SEQ ID NO: 362170 - DNA, 25 bp, Artificial
  Probe
ctatattgagggtcctatccttaat

SEQ ID NO: 362171 - DNA, 25 bp, Artificial
  Probe
ttgtggccatcctcagctacatagg

SEQ ID NO: 362172 - DNA, 25 bp, Artificial
  Probe
agtttgtggccatcctcagctacat

SEQ ID NO: 362173 - DNA, 25 bp, Artificial
  Probe
ctgtagtcctaataccttgagaggc

SEQ ID NO: 362174 - DNA, 25 bp, Artificial
  Probe
tattgagggtcctatccttaataaa

SEQ ID NO: 362175 - DNA, 25 bp, Artificial
  Probe
cttgtcctatattgagggtcctatc

SEQ ID NO: 362176 - DNA, 25 bp, Artificial
  Probe
gccagtccttgtcctatattgaggg

SEQ ID NO: 362177 - DNA, 25 bp, Artificial
  Probe
gtttgtggccatcctcagctacata

SEQ ID NO: 362178 - DNA, 25 bp, Artificial
  Probe
gtacctgtagtcctaataccttgag

SEQ ID NO: 362179 - DNA, 25 bp, Artificial
  Probe
tgagggtcctatccttaataaacct

SEQ ID NO: 362180 - DNA, 25 bp, Artificial
  Probe
gctttgaagccagtccttgtcctat

SEQ ID NO: 362181 - DNA, 25 bp, Artificial
  Probe
ctaataccttgagaggctgcagaca

SEQ ID NO: 362182 - DNA, 25 bp, Artificial
  Probe
gggcagcttgggttacatactttta

SEQ ID NO: 362183 - DNA, 25 bp, Artificial
  Probe
gtcctaataccttgagaggctgcag

SEQ ID NO: 362184 - DNA, 25 bp, Artificial
  Probe
tacttttaaactgacctgtctgggg

SEQ ID NO: 362185 - DNA, 25 bp, Artificial
  Probe
ccctggaacagtgaggatgtgatca

SEQ ID NO: 362186 - DNA, 25 bp, Artificial
  Probe
agctacatagggagctttgaagcca

SEQ ID NO: 362187 - DNA, 25 bp, Artificial
  Probe
aagccagtccttgtcctatattgag

SEQ ID NO: 362188 - DNA, 25 bp, Artificial
  Probe
ggacctgggtgttattgacatgtac

SEQ ID NO: 362189 - DNA, 25 bp, Artificial
  Probe
aactgacctgtctggggcaagggca

SEQ ID NO: 362190 - DNA, 25 bp, Artificial
  Probe
gtccttgtcctatattgagggtcct

SEQ ID NO: 362191 - DNA, 25 bp, Artificial
  Probe
gacatgtacctgtagtcctaatacc

SEQ ID NO: 362192 - DNA, 25 bp, Artificial
  Probe
ttattgacatgtacctgtagtccta

SEQ ID NO: 362193 - DNA, 25 bp, Artificial
  Probe
ttgacatgtacctgtagtcctaata

SEQ ID NO: 362194 - DNA, 25 bp, Artificial
  Probe
aagacctgggacctgggtgttattg

SEQ ID NO: 362195 - DNA, 25 bp, Artificial
  Probe
agtcctaataccttgagaggctgca

SEQ ID NO: 362196 - DNA, 25 bp, Artificial
  Probe
acctgggtgttattgacatgtacct

SEQ ID NO: 362197 - DNA, 25 bp, Artificial
  Probe
atgtacctgtagtcctaataccttg

SEQ ID NO: 362198 - DNA, 25 bp, Artificial
  Probe
gtgttattgacatgtacctgtagtc

SEQ ID NO: 362199 - DNA, 25 bp, Artificial
  Probe
gtgccagttcttggaggaaaagaca

SEQ ID NO: 362200 - DNA, 25 bp, Artificial
  Probe
tacatagggagctttgaagccagtc

SEQ ID NO: 362201 - DNA, 25 bp, Artificial
  Probe
cttttaaactgacctgtctggggca

SEQ ID NO: 362202 - DNA, 25 bp, Artificial
  Probe
aaactgacctgtctggggcaagggc

SEQ ID NO: 362203 - DNA, 25 bp, Artificial
  Probe
ttttaaactgacctgtctggggcaa

SEQ ID NO: 362204 - DNA, 25 bp, Artificial
  Probe
tatattgagggtcctatccttaata

SEQ ID NO: 362205 - DNA, 25 bp, Artificial
  Probe
taataccttgagaggctgcagacag

SEQ ID NO: 362206 - DNA, 25 bp, Artificial
  Probe
agcgactagccctggaacagtgagg

SEQ ID NO: 362207 - DNA, 25 bp, Artificial
  Probe
agtgccagttcttggaggaaaagac

SEQ ID NO: 362208 - DNA, 25 bp, Artificial
  Probe
agacctgggacctgggtgttattga

SEQ ID NO: 362209 - DNA, 25 bp, Artificial
  Probe
gctacatagggagctttgaagccag

SEQ ID NO: 362210 - DNA, 25 bp, Artificial
  Probe
tgaaactgggaaccagctgtcagga

SEQ ID NO: 362211 - DNA, 25 bp, Artificial
  Probe
tgcctatggcctgacgcggactcca

SEQ ID NO: 362212 - DNA, 25 bp, Artificial
  Probe
cctgcacacgcaggtggccgcagtg

SEQ ID NO: 362213 - DNA, 25 bp, Artificial
  Probe
ggcaacctcgtctcctttgttctct

SEQ ID NO: 362214 - DNA, 25 bp, Artificial
  Probe
cactgctatttggaagaagttttcg

SEQ ID NO: 362215 - DNA, 25 bp, Artificial
  Probe
ctctgcttttccttctgcccaggag

SEQ ID NO: 362216 - DNA, 25 bp, Artificial
  Probe
tccgtgggcgcctcggagaaaatat

SEQ ID NO: 362217 - DNA, 25 bp, Artificial
  Probe
cctgcttatcttggacgatgccacc

SEQ ID NO: 362218 - DNA, 25 bp, Artificial
  Probe
ggaaagtgtaccagtcactggcagt

SEQ ID NO: 362219 - DNA, 25 bp, Artificial
  Probe
ggcccagaagtttaggcagaagttg

SEQ ID NO: 362220 - DNA, 25 bp, Artificial
  Probe
accatgagtgtctcgggaatgctgc

SEQ ID NO: 362221 - DNA, 25 bp, Artificial
  Probe
tctatccctccatgcagaagtccgt

SEQ ID NO: 362222 - DNA, 25 bp, Artificial
  Probe
catcccaacgtccaggtgcttcagg

SEQ ID NO: 362223 - DNA, 25 bp, Artificial
  Probe
ctcctgtatgagagccccgagtggg

SEQ ID NO: 362224 - DNA, 25 bp, Artificial
  Probe
ccgagtgggcctctcggacggttct

SEQ ID NO: 362225 - DNA, 25 bp, Artificial
  Probe
aatattcgaatacctggaccggact

SEQ ID NO: 362226 - DNA, 25 bp, Artificial
  Probe
gaagccgctaaacaagaaagaggcc

SEQ ID NO: 362227 - DNA, 25 bp, Artificial
  Probe
tggaggtcctgctctccatctatcc

SEQ ID NO: 362228 - DNA, 25 bp, Artificial
  Probe
gggcgcctcggagaaaatattcgaa

SEQ ID NO: 362229 - DNA, 25 bp, Artificial
  Probe
gcgaggcctgtgtctcctggcgttc

SEQ ID NO: 362230 - DNA, 25 bp, Artificial
  Probe
tgcttttccttctgcccaggaggct

SEQ ID NO: 362231 - DNA, 25 bp, Artificial
  Probe
gagaggcccagaagtttaggcagaa

SEQ ID NO: 362232 - DNA, 25 bp, Artificial
  Probe
gggacaagagccactgctatttgga

SEQ ID NO: 362233 - DNA, 25 bp, Artificial
  Probe
tctctaccagcttcagttcaccagg

SEQ ID NO: 362234 - DNA, 25 bp, Artificial
  Probe
ctcgaggccctgtcggcgatgccta

SEQ ID NO: 362235 - DNA, 25 bp, Artificial
  Probe
ctatgacacagaggtaggtgaaact

SEQ ID NO: 362236 - DNA, 25 bp, Artificial
  Probe
gatccggaagccacgcctgcttatc

SEQ ID NO: 362237 - DNA, 25 bp, Artificial
  Probe
ccagctgtcaggaggtcagcgacag

SEQ ID NO: 362238 - DNA, 25 bp, Artificial
  Probe
gaaggtgcaggagtctctagcaaag

SEQ ID NO: 362239 - DNA, 25 bp, Artificial
  Probe
tcgaatacctggaccggactccctg

SEQ ID NO: 362240 - DNA, 25 bp, Artificial
  Probe
tgctctccgctcagtggctcactgg

SEQ ID NO: 362241 - DNA, 25 bp, Artificial
  Probe
gttccaagatgtctcctttgcctac

SEQ ID NO: 362242 - DNA, 25 bp, Artificial
  Probe
cctgttcctgtggtacctggggcga

SEQ ID NO: 362243 - DNA, 25 bp, Artificial
  Probe
ccaccagtgccctggatgctggcaa

SEQ ID NO: 362244 - DNA, 25 bp, Artificial
  Probe
acctgcacacgcaggtggccgcagt

SEQ ID NO: 362245 - DNA, 25 bp, Artificial
  Probe
tgggaattctgtacctcggtgggca

SEQ ID NO: 362246 - DNA, 25 bp, Artificial
  Probe
agccgctaaacaagaaagaggccct

SEQ ID NO: 362247 - DNA, 25 bp, Artificial
  Probe
agtccacgcaggtggccctcgaggc

SEQ ID NO: 362248 - DNA, 25 bp, Artificial
  Probe
attctacctcactgtggtcaccctg

SEQ ID NO: 362249 - DNA, 25 bp, Artificial
  Probe
cgtacggagctttgccaacgaggag

SEQ ID NO: 362250 - DNA, 25 bp, Artificial
  Probe
aggggctgtcagcagcggcaacctc

SEQ ID NO: 362251 - DNA, 25 bp, Artificial
  Probe
ccagtcactggcagtgaaggtgcag

SEQ ID NO: 362252 - DNA, 25 bp, Artificial
  Probe
agaggccctggcttacgtcaccgaa

SEQ ID NO: 362253 - DNA, 25 bp, Artificial
  Probe
tatcccgggaaggtgactgccttgg

SEQ ID NO: 362254 - DNA, 25 bp, Artificial
  Probe
gaattctgtacctcggtgggcagct

SEQ ID NO: 362255 - DNA, 25 bp, Artificial
  Probe
gtggccttggctcgagccttgatcc

SEQ ID NO: 362256 - DNA, 25 bp, Artificial
  Probe
agaggagcgctcctgctcagcgcat

SEQ ID NO: 362257 - DNA, 25 bp, Artificial
  Probe
tccaggaggtacctcgaacccagtg

SEQ ID NO: 362258 - DNA, 25 bp, Artificial
  Probe
ttcctggggaacgttcctctctgtg

SEQ ID NO: 362259 - DNA, 25 bp, Artificial
  Probe
gggaacgttcctctctgtgacaggt

SEQ ID NO: 362260 - DNA, 25 bp, Artificial
  Probe
tccgtgcttctcagcctggggcaga

SEQ ID NO: 362261 - DNA, 25 bp, Artificial
  Probe
cgttcctctctgtgacaggtgcatg

SEQ ID NO: 362262 - DNA, 25 bp, Artificial
  Probe
catgcccgctcaacacgcatataga

SEQ ID NO: 362263 - DNA, 25 bp, Artificial
  Probe
agatcgagctgtgagattcctccta

SEQ ID NO: 362264 - DNA, 25 bp, Artificial
  Probe
cttccagctgggaaaggaatgccga

SEQ ID NO: 362265 - DNA, 25 bp, Artificial
  Probe
cctcgaacccagtgcggaaggatgg

SEQ ID NO: 362266 - DNA, 25 bp, Artificial
  Probe
tccagggtcctgaccgccaagtggc

SEQ ID NO: 362267 - DNA, 25 bp, Artificial
  Probe
cttacaggaacatgcatgacacaca

SEQ ID NO: 362268 - DNA, 25 bp, Artificial
  Probe
cctggggaacgttcctctctgtgac

SEQ ID NO: 362269 - DNA, 25 bp, Artificial
  Probe
ggcacctagaggagcgctcctgctc

SEQ ID NO: 362270 - DNA, 25 bp, Artificial
  Probe
acatttcttccagctgggaaaggaa

SEQ ID NO: 362271 - DNA, 25 bp, Artificial
  Probe
atgcatgacacacactactgaggac

SEQ ID NO: 362272 - DNA, 25 bp, Artificial
  Probe
acacttgttccgtgcttctcagcct

SEQ ID NO: 362273 - DNA, 25 bp, Artificial
  Probe
gtttctcagatcgagctgtgagatt

SEQ ID NO: 362274 - DNA, 25 bp, Artificial
  Probe
ttacaggaacatgcatgacacacac

SEQ ID NO: 362275 - DNA, 25 bp, Artificial
  Probe
gggcacctagaggagcgctcctgct

SEQ ID NO: 362276 - DNA, 25 bp, Artificial
  Probe
ctgtgacaggtgcatgcccgctcaa

SEQ ID NO: 362277 - DNA, 25 bp, Artificial
  Probe
tactgaggacagacacaggtcccct

SEQ ID NO: 362278 - DNA, 25 bp, Artificial
  Probe
acattcctggggaacgttcctctct

SEQ ID NO: 362279 - DNA, 25 bp, Artificial
  Probe
aacacatttcttccagctgggaaag

SEQ ID NO: 362280 - DNA, 25 bp, Artificial
  Probe
cgctgacccagttccttggaccttg

SEQ ID NO: 362281 - DNA, 25 bp, Artificial
  Probe
cccagttccttggaccttgaggagg

SEQ ID NO: 362282 - DNA, 25 bp, Artificial
  Probe
ttcctcctattttgggcactggggg

SEQ ID NO: 362283 - DNA, 25 bp, Artificial
  Probe
gagggagcaccaacttacaggaaca

SEQ ID NO: 362284 - DNA, 25 bp, Artificial
  Probe
tagaggagcgctcctgctcagcgca

SEQ ID NO: 362285 - DNA, 25 bp, Artificial
  Probe
ggagaaaacacatttcttccagctg

SEQ ID NO: 362286 - DNA, 25 bp, Artificial
  Probe
atttcttccagctgggaaaggaatg

SEQ ID NO: 362287 - DNA, 25 bp, Artificial
  Probe
gagaaaacacatttcttccagctgg

SEQ ID NO: 362288 - DNA, 25 bp, Artificial
  Probe
ggaacgttcctctctgtgacaggtg

SEQ ID NO: 362289 - DNA, 25 bp, Artificial
  Probe
gcgggtttctcagatcgagctgtga

SEQ ID NO: 362290 - DNA, 25 bp, Artificial
  Probe
caggaggtacctcgaacccagtgcg

SEQ ID NO: 362291 - DNA, 25 bp, Artificial
  Probe
aacatgcatgacacacactactgag

SEQ ID NO: 362292 - DNA, 25 bp, Artificial
  Probe
taagggacacgctcccttgttcagc

SEQ ID NO: 362293 - DNA, 25 bp, Artificial
  Probe
gaggtacctcgaacccagtgcggaa

SEQ ID NO: 362294 - DNA, 25 bp, Artificial
  Probe
agcaccaacttacaggaacatgcat

SEQ ID NO: 362295 - DNA, 25 bp, Artificial
  Probe
tacctcgaacccagtgcggaaggat

SEQ ID NO: 362296 - DNA, 25 bp, Artificial
  Probe
aggaacatgcatgacacacactact

SEQ ID NO: 362297 - DNA, 25 bp, Artificial
  Probe
ctccaggaggtacctcgaacccagt

SEQ ID NO: 362298 - DNA, 25 bp, Artificial
  Probe
aggagcgctcctgctcagcgcatca

SEQ ID NO: 362299 - DNA, 25 bp, Artificial
  Probe
cgggtttctcagatcgagctgtgag

SEQ ID NO: 362300 - DNA, 25 bp, Artificial
  Probe
ctattttgggcactgggggtctttg

SEQ ID NO: 362301 - DNA, 25 bp, Artificial
  Probe
gcatgacacacactactgaggacag

SEQ ID NO: 362302 - DNA, 25 bp, Artificial
  Probe
ccacgtgccaatgtccaggacaagg

SEQ ID NO: 362303 - DNA, 25 bp, Artificial
  Probe
ggcactggctggctatttgaacctg

SEQ ID NO: 362304 - DNA, 25 bp, Artificial
  Probe
aatgtccaggacaaggacctctttt

SEQ ID NO: 362305 - DNA, 25 bp, Artificial
  Probe
caatgtccaggacaaggacctcttt

SEQ ID NO: 362306 - DNA, 25 bp, Artificial
  Probe
tgcggcactggctggctatttgaac

SEQ ID NO: 362307 - DNA, 25 bp, Artificial
  Probe
cgtgccaatgtccaggacaaggacc

SEQ ID NO: 362308 - DNA, 25 bp, Artificial
  Probe
actggctggctatttgaacctggcc

SEQ ID NO: 362309 - DNA, 25 bp, Artificial
  Probe
cccacgtgccaatgtccaggacaag

SEQ ID NO: 362310 - DNA, 25 bp, Artificial
  Probe
gcactggctggctatttgaacctgg

SEQ ID NO: 362311 - DNA, 25 bp, Artificial
  Probe
ttgcggcactggctggctatttgaa

SEQ ID NO: 362312 - DNA, 25 bp, Artificial
  Probe
ccaatgtccaggacaaggacctctt

SEQ ID NO: 362313 - DNA, 25 bp, Artificial
  Probe
gccaatgtccaggacaaggacctct

SEQ ID NO: 362314 - DNA, 25 bp, Artificial
  Probe
aggaacccacgtgccaatgtccagg

SEQ ID NO: 362315 - DNA, 25 bp, Artificial
  Probe
gtgccaatgtccaggacaaggacct

SEQ ID NO: 362316 - DNA, 25 bp, Artificial
  Probe
acgtgccaatgtccaggacaaggac

SEQ ID NO: 362317 - DNA, 25 bp, Artificial
  Probe
atgtccaggacaaggacctcttttc

SEQ ID NO: 362318 - DNA, 25 bp, Artificial
  Probe
cggcactggctggctatttgaacct

SEQ ID NO: 362319 - DNA, 25 bp, Artificial
  Probe
tgtccaggacaaggacctcttttcg

SEQ ID NO: 362320 - DNA, 25 bp, Artificial
  Probe
aggaggaacccacgtgccaatgtcc

SEQ ID NO: 362321 - DNA, 25 bp, Artificial
  Probe
ggaggaacccacgtgccaatgtcca

SEQ ID NO: 362322 - DNA, 25 bp, Artificial
  Probe
gaggaacccacgtgccaatgtccag

SEQ ID NO: 362323 - DNA, 25 bp, Artificial
  Probe
tgccaatgtccaggacaaggacctc

SEQ ID NO: 362324 - DNA, 25 bp, Artificial
  Probe
acccacgtgccaatgtccaggacaa

SEQ ID NO: 362325 - DNA, 25 bp, Artificial
  Probe
tggctggctatttgaacctggccct

SEQ ID NO: 362326 - DNA, 25 bp, Artificial
  Probe
aacccacgtgccaatgtccaggaca

SEQ ID NO: 362327 - DNA, 25 bp, Artificial
  Probe
cacgtgccaatgtccaggacaagga

SEQ ID NO: 362328 - DNA, 25 bp, Artificial
  Probe
cactggctggctatttgaacctggc

SEQ ID NO: 362329 - DNA, 25 bp, Artificial
  Probe
gaacccacgtgccaatgtccaggac

SEQ ID NO: 362330 - DNA, 25 bp, Artificial
  Probe
ctggctggctatttgaacctggccc

SEQ ID NO: 362331 - DNA, 25 bp, Artificial
  Probe
gcggcactggctggctatttgaacc

SEQ ID NO: 362332 - DNA, 25 bp, Artificial
  Probe
ggaacccacgtgccaatgtccagga

SEQ ID NO: 362333 - DNA, 25 bp, Artificial
  Probe
tcatctaagcctagcgtttgaacct

SEQ ID NO: 362334 - DNA, 25 bp, Artificial
  Probe
cttcagcggggcaagactcggcaag

SEQ ID NO: 362335 - DNA, 25 bp, Artificial
  Probe
acctcactgtgctcggctgctcagt

SEQ ID NO: 362336 - DNA, 25 bp, Artificial
  Probe
agtgtttagggactcaggcacggct

SEQ ID NO: 362337 - DNA, 25 bp, Artificial
  Probe
atatgacatgaccaagctggtgtgg

SEQ ID NO: 362338 - DNA, 25 bp, Artificial
  Probe
gatgtgagttttctcatctaagcct

SEQ ID NO: 362339 - DNA, 25 bp, Artificial
  Probe
tgcatgcgtgcacacgtaaacacac

SEQ ID NO: 362340 - DNA, 25 bp, Artificial
  Probe
cagcggggcaagactcggcaagaaa

SEQ ID NO: 362341 - DNA, 25 bp, Artificial
  Probe
cagtaatgtttgagccatcgagtgg

SEQ ID NO: 362342 - DNA, 25 bp, Artificial
  Probe
aagggttgcaccatatgacatgacc

SEQ ID NO: 362343 - DNA, 25 bp, Artificial
  Probe
caagactcggcaagaaagatgatgg

SEQ ID NO: 362344 - DNA, 25 bp, Artificial
  Probe
aatttgaatggcacctaaaccagta

SEQ ID NO: 362345 - DNA, 25 bp, Artificial
  Probe
aaatgcagattcaaacccagcaaag

SEQ ID NO: 362346 - DNA, 25 bp, Artificial
  Probe
ttctgactttgttcagagacacata

SEQ ID NO: 362347 - DNA, 25 bp, Artificial
  Probe
ttcaggaagggttgcaccatatgac

SEQ ID NO: 362348 - DNA, 25 bp, Artificial
  Probe
ccaccacactgcaagggtgtgtagt

SEQ ID NO: 362349 - DNA, 25 bp, Artificial
  Probe
aaacgtcggatctcgcgccttcaac

SEQ ID NO: 362350 - DNA, 25 bp, Artificial
  Probe
agggactcaggcacggctggtcttc

SEQ ID NO: 362351 - DNA, 25 bp, Artificial
  Probe
tcaggcacggctggtcttcaggaag

SEQ ID NO: 362352 - DNA, 25 bp, Artificial
  Probe
ctcaggcacggctggtcttcaggaa

SEQ ID NO: 362353 - DNA, 25 bp, Artificial
  Probe
ggcccacaacctaaatgcagattca

SEQ ID NO: 362354 - DNA, 25 bp, Artificial
  Probe
gacacatacttcagcggggcaagac

SEQ ID NO: 362355 - DNA, 25 bp, Artificial
  Probe
acactgcaagggtgtgtagtgtctc

SEQ ID NO: 362356 - DNA, 25 bp, Artificial
  Probe
ctgcattctgactttgttcagagac

SEQ ID NO: 362357 - DNA, 25 bp, Artificial
  Probe
actgtgctcggctgctcagtggctc

SEQ ID NO: 362358 - DNA, 25 bp, Artificial
  Probe
tgtagtgtctcaatatcacgtgtga

SEQ ID NO: 362359 - DNA, 25 bp, Artificial
  Probe
tgccaggcccacaacctaaatgcag

SEQ ID NO: 362360 - DNA, 25 bp, Artificial
  Probe
aagctcacctgcattctgactttgt

SEQ ID NO: 362361 - DNA, 25 bp, Artificial
  Probe
actgcaagggtgtgtagtgtctcaa

SEQ ID NO: 362362 - DNA, 25 bp, Artificial
  Probe
ttttctcatctaagcctagcgtttg

SEQ ID NO: 362363 - DNA, 25 bp, Artificial
  Probe
gctggtcttcaggaagggttgcacc

SEQ ID NO: 362364 - DNA, 25 bp, Artificial
  Probe
ttatctgttccaccacactgcaagg

SEQ ID NO: 362365 - DNA, 25 bp, Artificial
  Probe
gcgtgcacacgtaaacacacagcaa

SEQ ID NO: 362366 - DNA, 25 bp, Artificial
  Probe
ggcacctaaaccagtacgctctctt

SEQ ID NO: 362367 - DNA, 25 bp, Artificial
  Probe
aaaccagtacgctctctttgtttgt

SEQ ID NO: 362368 - DNA, 25 bp, Artificial
  Probe
atgcagattcaaacccagcaaagaa

SEQ ID NO: 362369 - DNA, 25 bp, Artificial
  Probe
gcaagactcggcaagaaagatgatg

SEQ ID NO: 362370 - DNA, 25 bp, Artificial
  Probe
ctttgttcagagacacatacttcag

SEQ ID NO: 362371 - DNA, 25 bp, Artificial
  Probe
ttttaagatcagacgttcttatctg

SEQ ID NO: 362372 - DNA, 25 bp, Artificial
  Probe
gtctcaatatcacgtgtgagtatgt

SEQ ID NO: 362373 - DNA, 25 bp, Artificial
  Probe
gactaaaaagctcacctgcattctg

SEQ ID NO: 362374 - DNA, 25 bp, Artificial
  Probe
acgtaaacacacagcaacaccagtg

SEQ ID NO: 362375 - DNA, 25 bp, Artificial
  Probe
ggacatcttttaagatcagacgttc

SEQ ID NO: 362376 - DNA, 25 bp, Artificial
  Probe
gatcagacgttcttatctgttccac

SEQ ID NO: 362377 - DNA, 25 bp, Artificial
  Probe
agcgtttgaacctgccaggcccaca

SEQ ID NO: 362378 - DNA, 25 bp, Artificial
  Probe
ctaagcacagtaatgtttgagccat

SEQ ID NO: 362379 - DNA, 25 bp, Artificial
  Probe
tctgctagccttgttccttcaaaag

SEQ ID NO: 362380 - DNA, 25 bp, Artificial
  Probe
ccggggtcatctttgggtcctctgg

SEQ ID NO: 362381 - DNA, 25 bp, Artificial
  Probe
ttcaatgttgggttgcccactggtt

SEQ ID NO: 362382 - DNA, 25 bp, Artificial
  Probe
ctgccaatatgctggaattcaaaat

SEQ ID NO: 362383 - DNA, 25 bp, Artificial
  Probe
tagactttcactcaggactcagaat

SEQ ID NO: 362384 - DNA, 25 bp, Artificial
  Probe
ccaatcagcagaagtggcttcattt

SEQ ID NO: 362385 - DNA, 25 bp, Artificial
  Probe
cagaagtggcttcatttgcatataa

SEQ ID NO: 362386 - DNA, 25 bp, Artificial
  Probe
tcaatgttgggttgcccactggtta

SEQ ID NO: 362387 - DNA, 25 bp, Artificial
  Probe
tccaactcaatggagacaattaggt

SEQ ID NO: 362388 - DNA, 25 bp, Artificial
  Probe
ctctagactttcactcaggactcag

SEQ ID NO: 362389 - DNA, 25 bp, Artificial
  Probe
acccgatcaggcaaccaatcagcag

SEQ ID NO: 362390 - DNA, 25 bp, Artificial
  Probe
tccattagactgaaggttaatcccg

SEQ ID NO: 362391 - DNA, 25 bp, Artificial
  Probe
actcaggactcagaatcaggttctg

SEQ ID NO: 362392 - DNA, 25 bp, Artificial
  Probe
cctgtgctgaggattaaaggtgtca

SEQ ID NO: 362393 - DNA, 25 bp, Artificial
  Probe
cttgttccttcaaaagttggtgatt

SEQ ID NO: 362394 - DNA, 25 bp, Artificial
  Probe
cagaatcaggttctgctagccttgt

SEQ ID NO: 362395 - DNA, 25 bp, Artificial
  Probe
tctacgaacccgatcaggcaaccaa

SEQ ID NO: 362396 - DNA, 25 bp, Artificial
  Probe
ccctgtgctgaggattaaaggtgtc

SEQ ID NO: 362397 - DNA, 25 bp, Artificial
  Probe
gaatcaggttctgctagccttgttc

SEQ ID NO: 362398 - DNA, 25 bp, Artificial
  Probe
cggggtcatctttgggtcctctgga

SEQ ID NO: 362399 - DNA, 25 bp, Artificial
  Probe
acgaacccgatcaggcaaccaatca

SEQ ID NO: 362400 - DNA, 25 bp, Artificial
  Probe
aatcagcagaagtggcttcatttgc

SEQ ID NO: 362401 - DNA, 25 bp, Artificial
  Probe
aatctcaattccattagactgaagg

SEQ ID NO: 362402 - DNA, 25 bp, Artificial
  Probe
gttctgctagccttgttccttcaaa

SEQ ID NO: 362403 - DNA, 25 bp, Artificial
  Probe
tcccggggtcatctttgggtcctct

SEQ ID NO: 362404 - DNA, 25 bp, Artificial
  Probe
tcaggactcagaatcaggttctgct

SEQ ID NO: 362405 - DNA, 25 bp, Artificial
  Probe
ggcaaccaatcagcagaagtggctt

SEQ ID NO: 362406 - DNA, 25 bp, Artificial
  Probe
gttgggttgcccactggttatagtt

SEQ ID NO: 362407 - DNA, 25 bp, Artificial
  Probe
ttgcccactggttatagttaattat

SEQ ID NO: 362408 - DNA, 25 bp, Artificial
  Probe
tgccaatatgctggaattcaaaatt

SEQ ID NO: 362409 - DNA, 25 bp, Artificial
  Probe
atatttcaatgttgggttgcccact

SEQ ID NO: 362410 - DNA, 25 bp, Artificial
  Probe
ctgctgccaatatgctggaattcaa

SEQ ID NO: 362411 - DNA, 25 bp, Artificial
  Probe
gcacaacatccaactcaatggagac

SEQ ID NO: 362412 - DNA, 25 bp, Artificial
  Probe
agcagaagtggcttcatttgcatat

SEQ ID NO: 362413 - DNA, 25 bp, Artificial
  Probe
catccaactcaatggagacaattag

SEQ ID NO: 362414 - DNA, 25 bp, Artificial
  Probe
tgggttgcccactggttatagttaa

SEQ ID NO: 362415 - DNA, 25 bp, Artificial
  Probe
gtcactaccaatatttcaatgttgg

SEQ ID NO: 362416 - DNA, 25 bp, Artificial
  Probe
tctgccctgtgctgaggattaaagg

SEQ ID NO: 362417 - DNA, 25 bp, Artificial
  Probe
aactcaatggagacaattaggtgcc

SEQ ID NO: 362418 - DNA, 25 bp, Artificial
  Probe
gactgaaggttaatcccggggtcat

SEQ ID NO: 362419 - DNA, 25 bp, Artificial
  Probe
aagcacaacatccaactcaatggag

SEQ ID NO: 362420 - DNA, 25 bp, Artificial
  Probe
cgatcaggcaaccaatcagcagaag

SEQ ID NO: 362421 - DNA, 25 bp, Artificial
  Probe
tcactcaggactcagaatcaggttc

SEQ ID NO: 362422 - DNA, 25 bp, Artificial
  Probe
actttcactcaggactcagaatcag

SEQ ID NO: 362423 - DNA, 25 bp, Artificial
  Probe
gtcatctttgggtcctctggatggg

SEQ ID NO: 362424 - DNA, 25 bp, Artificial
  Probe
atcaggttctgctagccttgttcct

SEQ ID NO: 362425 - DNA, 25 bp, Artificial
  Probe
ggacttgtactgagaagggacagac

SEQ ID NO: 362426 - DNA, 25 bp, Artificial
  Probe
agccttggcctgagcctcctgtgaa

SEQ ID NO: 362427 - DNA, 25 bp, Artificial
  Probe
cttcagggatcatgggctgtgtctg

SEQ ID NO: 362428 - DNA, 25 bp, Artificial
  Probe
tctcccagggtagtcccccaattgg

SEQ ID NO: 362429 - DNA, 25 bp, Artificial
  Probe
ctgtgctctaggatgtctgatgttg

SEQ ID NO: 362430 - DNA, 25 bp, Artificial
  Probe
gctcaaaccccgaagatgactggat

SEQ ID NO: 362431 - DNA, 25 bp, Artificial
  Probe
cagccttggcctgagcctcctgtga

SEQ ID NO: 362432 - DNA, 25 bp, Artificial
  Probe
ggatcatgggctgtgtctgcagctc

SEQ ID NO: 362433 - DNA, 25 bp, Artificial
  Probe
ccaattggggactagcagagctgag

SEQ ID NO: 362434 - DNA, 25 bp, Artificial
  Probe
cttgtactgagaagggacagacacc

SEQ ID NO: 362435 - DNA, 25 bp, Artificial
  Probe
tgtgtgtgtgatgtctcccagggta

SEQ ID NO: 362436 - DNA, 25 bp, Artificial
  Probe
gctcttctgtctacggccaatgggg

SEQ ID NO: 362437 - DNA, 25 bp, Artificial
  Probe
gagtaaacccagtggaaactagaat

SEQ ID NO: 362438 - DNA, 25 bp, Artificial
  Probe
ccagagcttggcaaagtgtgtgtgt

SEQ ID NO: 362439 - DNA, 25 bp, Artificial
  Probe
ttgcttgagggctcggagtaaaccc

SEQ ID NO: 362440 - DNA, 25 bp, Artificial
  Probe
cacttttcagctcttctgtctacgg

SEQ ID NO: 362441 - DNA, 25 bp, Artificial
  Probe
tcaggcctctctacattccttcagg

SEQ ID NO: 362442 - DNA, 25 bp, Artificial
  Probe
ctgtctacggccaatgggggcctct

SEQ ID NO: 362443 - DNA, 25 bp, Artificial
  Probe
tggggaccagccttggcctgagcct

SEQ ID NO: 362444 - DNA, 25 bp, Artificial
  Probe
ccaatgggggcctctgagctgacaa

SEQ ID NO: 362445 - DNA, 25 bp, Artificial
  Probe
gcctctctacattccttcagggatc

SEQ ID NO: 362446 - DNA, 25 bp, Artificial
  Probe
ttgagggctcggagtaaacccagtg

SEQ ID NO: 362447 - DNA, 25 bp, Artificial
  Probe
tctcagcttcagtagctaggcaggg

SEQ ID NO: 362448 - DNA, 25 bp, Artificial
  Probe
taggtttcccccagagcttggcaaa

SEQ ID NO: 362449 - DNA, 25 bp, Artificial
  Probe
cccttcatggtagaggtgagtggaa

SEQ ID NO: 362450 - DNA, 25 bp, Artificial
  Probe
agtttcctgggctgtgctctaggat

SEQ ID NO: 362451 - DNA, 25 bp, Artificial
  Probe
tttgtagtttcctgggctgtgctct

SEQ ID NO: 362452 - DNA, 25 bp, Artificial
  Probe
gtgtgtgatgtctcccagggtagtc

SEQ ID NO: 362453 - DNA, 25 bp, Artificial
  Probe
tgaaaatctaggtttcccccagagc

SEQ ID NO: 362454 - DNA, 25 bp, Artificial
  Probe
tcccccagagcttggcaaagtgtgt

SEQ ID NO: 362455 - DNA, 25 bp, Artificial
  Probe
attccttcagggatcatgggctgtg

SEQ ID NO: 362456 - DNA, 25 bp, Artificial
  Probe
ccccaattggggactagcagagctg

SEQ ID NO: 362457 - DNA, 25 bp, Artificial
  Probe
ctgacaatctcaggtagtttttgta

SEQ ID NO: 362458 - DNA, 25 bp, Artificial
  Probe
ggaaactagaattccacttttcagc

SEQ ID NO: 362459 - DNA, 25 bp, Artificial
  Probe
gtgatgtctcccagggtagtccccc

SEQ ID NO: 362460 - DNA, 25 bp, Artificial
  Probe
ctacattccttcagggatcatgggc

SEQ ID NO: 362461 - DNA, 25 bp, Artificial
  Probe
tgtctcccagggtagtcccccaatt

SEQ ID NO: 362462 - DNA, 25 bp, Artificial
  Probe
ttggcctgagcctcctgtgaactcg

SEQ ID NO: 362463 - DNA, 25 bp, Artificial
  Probe
gtttttgtagtttcctgggctgtgc

SEQ ID NO: 362464 - DNA, 25 bp, Artificial
  Probe
gtctacggccaatgggggcctctga

SEQ ID NO: 362465 - DNA, 25 bp, Artificial
  Probe
tctgcagctcaaaccccgaagatga

SEQ ID NO: 362466 - DNA, 25 bp, Artificial
  Probe
tgtgtgtgtgtgtgatgtctcccag

SEQ ID NO: 362467 - DNA, 25 bp, Artificial
  Probe
gaagggacagacacccttcatggta

SEQ ID NO: 362468 - DNA, 25 bp, Artificial
  Probe
gggagctccttcaggcctctctaca

SEQ ID NO: 362469 - DNA, 25 bp, Artificial
  Probe
ggacagacacccttcatggtagagg

SEQ ID NO: 362470 - DNA, 25 bp, Artificial
  Probe
actcgttgcttgagggctcggagta

SEQ ID NO: 362471 - DNA, 25 bp, Artificial
  Probe
gaactggcccttttaggcacagggc

SEQ ID NO: 362472 - DNA, 25 bp, Artificial
  Probe
aggcgtgttctgcatcctggccgcg

SEQ ID NO: 362473 - DNA, 25 bp, Artificial
  Probe
agccgcacactctcagcaaaagctg

SEQ ID NO: 362474 - DNA, 25 bp, Artificial
  Probe
gcctcatagccgtcctcgagacatg

SEQ ID NO: 362475 - DNA, 25 bp, Artificial
  Probe
gcagcagacagctcggcctatatcc

SEQ ID NO: 362476 - DNA, 25 bp, Artificial
  Probe
tttcaggagtcctatcaaaacaatg

SEQ ID NO: 362477 - DNA, 25 bp, Artificial
  Probe
gcaaaagctgcctctggcttcactt

SEQ ID NO: 362478 - DNA, 25 bp, Artificial
  Probe
ctggccgcggggattgtactctcct

SEQ ID NO: 362479 - DNA, 25 bp, Artificial
  Probe
acactctcagcaaaagctgcctctg

SEQ ID NO: 362480 - DNA, 25 bp, Artificial
  Probe
caagagtctggcaggcgtgttctgc

SEQ ID NO: 362481 - DNA, 25 bp, Artificial
  Probe
ggagtcctatcaaaacaatgtcatc

SEQ ID NO: 362482 - DNA, 25 bp, Artificial
  Probe
cttgtgcacagatgacgacagcccc

SEQ ID NO: 362483 - DNA, 25 bp, Artificial
  Probe
agcagatcagtgatttcagaaacac

SEQ ID NO: 362484 - DNA, 25 bp, Artificial
  Probe
cccgaccgaggcacgtccatatgag

SEQ ID NO: 362485 - DNA, 25 bp, Artificial
  Probe
ctggcttcactttcggcagtgtgcc

SEQ ID NO: 362486 - DNA, 25 bp, Artificial
  Probe
attgtactctcctgcctcatagccg

SEQ ID NO: 362487 - DNA, 25 bp, Artificial
  Probe
agatccagactcttagccgcacact

SEQ ID NO: 362488 - DNA, 25 bp, Artificial
  Probe
accttcatcccagagcagatccaga

SEQ ID NO: 362489 - DNA, 25 bp, Artificial
  Probe
ccactctggggctcaatctgggcaa

SEQ ID NO: 362490 - DNA, 25 bp, Artificial
  Probe
cggcggaagggctcccgagtcccat

SEQ ID NO: 362491 - DNA, 25 bp, Artificial
  Probe
ggaaattgacctggagcacctccat

SEQ ID NO: 362492 - DNA, 25 bp, Artificial
  Probe
taaatagcttgtgcacagatgacga

SEQ ID NO: 362493 - DNA, 25 bp, Artificial
  Probe
gcagtgtgcccgagcaccgaactgg

SEQ ID NO: 362494 - DNA, 25 bp, Artificial
  Probe
ccgtcctcgagacatggtggagtcg

SEQ ID NO: 362495 - DNA, 25 bp, Artificial
  Probe
cgagcaccgaactggcccttttagg

SEQ ID NO: 362496 - DNA, 25 bp, Artificial
  Probe
ctggggctcaatctgggcaatgacc

SEQ ID NO: 362497 - DNA, 25 bp, Artificial
  Probe
agtgtgcccgagcaccgaactggcc

SEQ ID NO: 362498 - DNA, 25 bp, Artificial
  Probe
tgttctgcatcctggccgcggggat

SEQ ID NO: 362499 - DNA, 25 bp, Artificial
  Probe
tgacactttgccaacacgacaagcc

SEQ ID NO: 362500 - DNA, 25 bp, Artificial
  Probe
cactttcggcagtgtgcccgagcac

SEQ ID NO: 362501 - DNA, 25 bp, Artificial
  Probe
ccttttaggcacagggcccctaatg

SEQ ID NO: 362502 - DNA, 25 bp, Artificial
  Probe
tgggggctttttcaggagtcctatc

SEQ ID NO: 362503 - DNA, 25 bp, Artificial
  Probe
taatgggggctttttcaggagtcct

SEQ ID NO: 362504 - DNA, 25 bp, Artificial
  Probe
ctccatagacgtgtaaatagcttgt

SEQ ID NO: 362505 - DNA, 25 bp, Artificial
  Probe
ggggattgtactctcctgcctcata

SEQ ID NO: 362506 - DNA, 25 bp, Artificial
  Probe
ggccgcggggattgtactctcctgc

SEQ ID NO: 362507 - DNA, 25 bp, Artificial
  Probe
ctcgtcaattgacttgacccctctg

SEQ ID NO: 362508 - DNA, 25 bp, Artificial
  Probe
gtcccatcgaaagaggatgacaagg

SEQ ID NO: 362509 - DNA, 25 bp, Artificial
  Probe
ccgagcaccgaactggcccttttag

SEQ ID NO: 362510 - DNA, 25 bp, Artificial
  Probe
cttagccgcacactctcagcaaaag

SEQ ID NO: 362511 - DNA, 25 bp, Artificial
  Probe
ccgaactggcccttttaggcacagg

SEQ ID NO: 362512 - DNA, 25 bp, Artificial
  Probe
ctttcggcagtgtgcccgagcaccg

SEQ ID NO: 362513 - DNA, 25 bp, Artificial
  Probe
gccctggagcagatcagtgatttca

SEQ ID NO: 362514 - DNA, 25 bp, Artificial
  Probe
gctgcctctggcttcactttcggca

SEQ ID NO: 362515 - DNA, 25 bp, Artificial
  Probe
gcacagggcccctaatgggggcttt

SEQ ID NO: 362516 - DNA, 25 bp, Artificial
  Probe
gttttccacctcgtcaattgacttg

SEQ ID NO: 362517 - DNA, 25 bp, Artificial
  Probe
actccgtgactacctgagttccttc

SEQ ID NO: 362518 - DNA, 25 bp, Artificial
  Probe
ttctggaaccacgtgggagccctcc

SEQ ID NO: 362519 - DNA, 25 bp, Artificial
  Probe
tctggctggagaccttatcccgcct

SEQ ID NO: 362520 - DNA, 25 bp, Artificial
  Probe
acttcgcagatgagcccaccgaggc

SEQ ID NO: 362521 - DNA, 25 bp, Artificial
  Probe
gcagatgagcccaccgaggctcagg

SEQ ID NO: 362522 - DNA, 25 bp, Artificial
  Probe
ggtcgcgagaacctggcacgcatcc

SEQ ID NO: 362523 - DNA, 25 bp, Artificial
  Probe
ttgtagcagcttgtgtctggggcca

SEQ ID NO: 362524 - DNA, 25 bp, Artificial
  Probe
ccacatacaggaacggcctacttcg

SEQ ID NO: 362525 - DNA, 25 bp, Artificial
  Probe
ttttctggaaccacgtgggagccct

SEQ ID NO: 362526 - DNA, 25 bp, Artificial
  Probe
cccacttctggctggagaccttatc

SEQ ID NO: 362527 - DNA, 25 bp, Artificial
  Probe
gcccgcagaattaagtgggagcgcc

SEQ ID NO: 362528 - DNA, 25 bp, Artificial
  Probe
ttttctgctgtgcagaatattctat

SEQ ID NO: 362529 - DNA, 25 bp, Artificial
  Probe
tgggtcgcgagaacctggcacgcat

SEQ ID NO: 362530 - DNA, 25 bp, Artificial
  Probe
tggaagggttccacatacaggaacg

SEQ ID NO: 362531 - DNA, 25 bp, Artificial
  Probe
ccggtccccctggttgtagcagctt

SEQ ID NO: 362532 - DNA, 25 bp, Artificial
  Probe
cttcatttttctgctgtgcagaata

SEQ ID NO: 362533 - DNA, 25 bp, Artificial
  Probe
tgcccgcagaattaagtgggagcgc

SEQ ID NO: 362534 - DNA, 25 bp, Artificial
  Probe
gcggattctgcgtgtcaccctcgct

SEQ ID NO: 362535 - DNA, 25 bp, Artificial
  Probe
gtctggaagggttccacatacagga

SEQ ID NO: 362536 - DNA, 25 bp, Artificial
  Probe
acaggaacggcctacttcgcagatg

SEQ ID NO: 362537 - DNA, 25 bp, Artificial
  Probe
agtctggaagggttccacatacagg

SEQ ID NO: 362538 - DNA, 25 bp, Artificial
  Probe
agtatctttgcacaaaccaggggtg

SEQ ID NO: 362539 - DNA, 25 bp, Artificial
  Probe
gaacggcctacttcgcagatgagcc

SEQ ID NO: 362540 - DNA, 25 bp, Artificial
  Probe
gtgtctggggccaggacctgaactc

SEQ ID NO: 362541 - DNA, 25 bp, Artificial
  Probe
tggggccaggacctgaactccacgc

SEQ ID NO: 362542 - DNA, 25 bp, Artificial
  Probe
agctgtgtcgccagcgcatcgtggc

SEQ ID NO: 362543 - DNA, 25 bp, Artificial
  Probe
cccggtactccgtgactacctgagt

SEQ ID NO: 362544 - DNA, 25 bp, Artificial
  Probe
ctctggcttcatttttctgctgtgc

SEQ ID NO: 362545 - DNA, 25 bp, Artificial
  Probe
ccgctgcaggagctgtgtcgccagc

SEQ ID NO: 362546 - DNA, 25 bp, Artificial
  Probe
tcccagtatctttgcacaaaccagg

SEQ ID NO: 362547 - DNA, 25 bp, Artificial
  Probe
ctgcaggagctgtgtcgccagcgca

SEQ ID NO: 362548 - DNA, 25 bp, Artificial
  Probe
ccgggcggattctgcgtgtcaccct

SEQ ID NO: 362549 - DNA, 25 bp, Artificial
  Probe
tggcttcatttttctgctgtgcaga

SEQ ID NO: 362550 - DNA, 25 bp, Artificial
  Probe
agggtctctggcttcatttttctgc

SEQ ID NO: 362551 - DNA, 25 bp, Artificial
  Probe
catttttctgctgtgcagaatattc

SEQ ID NO: 362552 - DNA, 25 bp, Artificial
  Probe
tatttttctggaaccacgtgggagc

SEQ ID NO: 362553 - DNA, 25 bp, Artificial
  Probe
cctggttgtagcagcttgtgtctgg

SEQ ID NO: 362554 - DNA, 25 bp, Artificial
  Probe
gggttccacatacaggaacggccta

SEQ ID NO: 362555 - DNA, 25 bp, Artificial
  Probe
cgccgtgcccgcagaattaagtggg

SEQ ID NO: 362556 - DNA, 25 bp, Artificial
  Probe
tgcaggagctgtgtcgccagcgcat

SEQ ID NO: 362557 - DNA, 25 bp, Artificial
  Probe
gaagggttccacatacaggaacggc

SEQ ID NO: 362558 - DNA, 25 bp, Artificial
  Probe
gctccgggcggattctgcgtgtcac

SEQ ID NO: 362559 - DNA, 25 bp, Artificial
  Probe
ctacttcgcagatgagcccaccgag

SEQ ID NO: 362560 - DNA, 25 bp, Artificial
  Probe
ggtctctggcttcatttttctgctg

SEQ ID NO: 362561 - DNA, 25 bp, Artificial
  Probe
cgccagtctggaagggttccacata

SEQ ID NO: 362562 - DNA, 25 bp, Artificial
  Probe
tgcgtgtcaccctcgctccttgggg

SEQ ID NO: 362563 - DNA, 25 bp, Artificial
  Probe
ggaccttttgtaaaatcgctactgc

SEQ ID NO: 362564 - DNA, 25 bp, Artificial
  Probe
gttcttgtccctttctacctgaaag

SEQ ID NO: 362565 - DNA, 25 bp, Artificial
  Probe
gatgaaggctcttcccaggaacaag

SEQ ID NO: 362566 - DNA, 25 bp, Artificial
  Probe
tttgccatgattaaaatcggccagc

SEQ ID NO: 362567 - DNA, 25 bp, Artificial
  Probe
gagtctgaggccacatcctgccagg

SEQ ID NO: 362568 - DNA, 25 bp, Artificial
  Probe
gcgaaccctagatcccagagatgaa

SEQ ID NO: 362569 - DNA, 25 bp, Artificial
  Probe
atcgtgtttgccatgattaaaatcg

SEQ ID NO: 362570 - DNA, 25 bp, Artificial
  Probe
ctggttttcctcctctgttgttagg

SEQ ID NO: 362571 - DNA, 25 bp, Artificial
  Probe
gaccttttgtaaaatcgctactgct

SEQ ID NO: 362572 - DNA, 25 bp, Artificial
  Probe
acattgatcagagaggagctcttgt

SEQ ID NO: 362573 - DNA, 25 bp, Artificial
  Probe
ggcctaaagcgaaccctagatccca

SEQ ID NO: 362574 - DNA, 25 bp, Artificial
  Probe
ctactgctttctagcctggcctggt

SEQ ID NO: 362575 - DNA, 25 bp, Artificial
  Probe
accctagatcccagagatgaaggct

SEQ ID NO: 362576 - DNA, 25 bp, Artificial
  Probe
tgctgtgtgccattcctccatttcc

SEQ ID NO: 362577 - DNA, 25 bp, Artificial
  Probe
ttagcttgtgtttggctcatcccgt

SEQ ID NO: 362578 - DNA, 25 bp, Artificial
  Probe
ccgtcccattgtgcagcgttgggtg

SEQ ID NO: 362579 - DNA, 25 bp, Artificial
  Probe
accatagccgggttcatcgtgtttg

SEQ ID NO: 362580 - DNA, 25 bp, Artificial
  Probe
gagagaggagctctttcttggtttc

SEQ ID NO: 362581 - DNA, 25 bp, Artificial
  Probe
tgccaggtgggcaagacctctcctg

SEQ ID NO: 362582 - DNA, 25 bp, Artificial
  Probe
tcagagaggagctcttgtttgaggc

SEQ ID NO: 362583 - DNA, 25 bp, Artificial
  Probe
cagagaggagctcttgtttgaggca

SEQ ID NO: 362584 - DNA, 25 bp, Artificial
  Probe
tttcctcctctgttgttaggttcgg

SEQ ID NO: 362585 - DNA, 25 bp, Artificial
  Probe
tctcctgcaccgagcaaggattgag

SEQ ID NO: 362586 - DNA, 25 bp, Artificial
  Probe
tctagcctggcctggttttcctcct

SEQ ID NO: 362587 - DNA, 25 bp, Artificial
  Probe
ttgtaaaatcgctactgctttctag

SEQ ID NO: 362588 - DNA, 25 bp, Artificial
  Probe
cctctgttgttaggttcgggagctg

SEQ ID NO: 362589 - DNA, 25 bp, Artificial
  Probe
gaggccacatcctgccaggtgggca

SEQ ID NO: 362590 - DNA, 25 bp, Artificial
  Probe
gtctaactaatcaaactgtgaccag

SEQ ID NO: 362591 - DNA, 25 bp, Artificial
  Probe
caggatgctgtgtgccattcctcca

SEQ ID NO: 362592 - DNA, 25 bp, Artificial
  Probe
ttaaaatcggccagctgtttcgaac

SEQ ID NO: 362593 - DNA, 25 bp, Artificial
  Probe
catcctgccaggtgggcaagacctc

SEQ ID NO: 362594 - DNA, 25 bp, Artificial
  Probe
gtcccattgtgcagcgttgggtgcc

SEQ ID NO: 362595 - DNA, 25 bp, Artificial
  Probe
ccatgattaaaatcggccagctgtt

SEQ ID NO: 362596 - DNA, 25 bp, Artificial
  Probe
tagcccaggccaccatagccgggtt

SEQ ID NO: 362597 - DNA, 25 bp, Artificial
  Probe
gacggggccccaagaagaatccagt

SEQ ID NO: 362598 - DNA, 25 bp, Artificial
  Probe
atcccagagatgaaggctcttccca

SEQ ID NO: 362599 - DNA, 25 bp, Artificial
  Probe
tgacaggacttagcttgtgtttggc

SEQ ID NO: 362600 - DNA, 25 bp, Artificial
  Probe
tgctttctagcctggcctggttttc

SEQ ID NO: 362601 - DNA, 25 bp, Artificial
  Probe
tttctgagtctgaggccacatcctg

SEQ ID NO: 362602 - DNA, 25 bp, Artificial
  Probe
gaacaagctggagtgttcttgtccc

SEQ ID NO: 362603 - DNA, 25 bp, Artificial
  Probe
actgtgaccagagcattgtggacgg

SEQ ID NO: 362604 - DNA, 25 bp, Artificial
  Probe
agagatgaaggctcttcccaggaac

SEQ ID NO: 362605 - DNA, 25 bp, Artificial
  Probe
taaagcgaaccctagatcccagaga

SEQ ID NO: 362606 - DNA, 25 bp, Artificial
  Probe
cccaggaacaagctggagtgttctt

SEQ ID NO: 362607 - DNA, 25 bp, Artificial
  Probe
caccgagcaaggattgagtaacatt

SEQ ID NO: 362608 - DNA, 25 bp, Artificial
  Probe
ggagtgttcttgtccctttctacct

SEQ ID NO: 362609 - DNA, 25 bp, Artificial
  Probe
agacggtcgaacttgactatctaga

SEQ ID NO: 362610 - DNA, 25 bp, Artificial
  Probe
taggtgaacctgcggaaggatcatt

SEQ ID NO: 362611 - DNA, 25 bp, Artificial
  Probe
gtcggcccacggccttgcggagcgc

SEQ ID NO: 362612 - DNA, 25 bp, Artificial
  Probe
tcgctactaccgattggatggttta

SEQ ID NO: 362613 - DNA, 25 bp, Artificial
  Probe
cggccttgcggagcgctgagaagac

SEQ ID NO: 362614 - DNA, 25 bp, Artificial
  Probe
ggtttagtgaggccctcggatcggc

SEQ ID NO: 362615 - DNA, 25 bp, Artificial
  Probe
gacggtcgaacttgactatctagag

SEQ ID NO: 362616 - DNA, 25 bp, Artificial
  Probe
cccgtcgctactaccgattggatgg

SEQ ID NO: 362617 - DNA, 25 bp, Artificial
  Probe
gctactaccgattggatggtttagt

SEQ ID NO: 362618 - DNA, 25 bp, Artificial
  Probe
ccttgcggagcgctgagaagacggt

SEQ ID NO: 362619 - DNA, 25 bp, Artificial
  Probe
gtttccgtaggtgaacctgcggaag

SEQ ID NO: 362620 - DNA, 25 bp, Artificial
  Probe
cgtcgctactaccgattggatggtt

SEQ ID NO: 362621 - DNA, 25 bp, Artificial
  Probe
cttgcggagcgctgagaagacggtc

SEQ ID NO: 362622 - DNA, 25 bp, Artificial
  Probe
ctaccgattggatggtttagtgagg

SEQ ID NO: 362623 - DNA, 25 bp, Artificial
  Probe
taccgattggatggtttagtgaggc

SEQ ID NO: 362624 - DNA, 25 bp, Artificial
  Probe
ccgattggatggtttagtgaggccc

SEQ ID NO: 362625 - DNA, 25 bp, Artificial
  Probe
ggtcgaacttgactatctagaggaa

SEQ ID NO: 362626 - DNA, 25 bp, Artificial
  Probe
tcgaacttgactatctagaggaagt

SEQ ID NO: 362627 - DNA, 25 bp, Artificial
  Probe
gcccacggccttgcggagcgctgag

SEQ ID NO: 362628 - DNA, 25 bp, Artificial
  Probe
cgaacttgactatctagaggaagta

SEQ ID NO: 362629 - DNA, 25 bp, Artificial
  Probe
cttgactatctagaggaagtaaaag

SEQ ID NO: 362630 - DNA, 25 bp, Artificial
  Probe
aagacggtcgaacttgactatctag

SEQ ID NO: 362631 - DNA, 25 bp, Artificial
  Probe
gtcgaacttgactatctagaggaag

SEQ ID NO: 362632 - DNA, 25 bp, Artificial
  Probe
accgcccgtcgctactaccgattgg

SEQ ID NO: 362633 - DNA, 25 bp, Artificial
  Probe
ttgcggagcgctgagaagacggtcg

SEQ ID NO: 362634 - DNA, 25 bp, Artificial
  Probe
ccgtcgctactaccgattggatggt

SEQ ID NO: 362635 - DNA, 25 bp, Artificial
  Probe
ccgcccgtcgctactaccgattgga

SEQ ID NO: 362636 - DNA, 25 bp, Artificial
  Probe
ttagtgaggccctcggatcggcccc

SEQ ID NO: 362637 - DNA, 25 bp, Artificial
  Probe
agcgctgagaagacggtcgaacttg

SEQ ID NO: 362638 - DNA, 25 bp, Artificial
  Probe
tcggcccacggccttgcggagcgct

SEQ ID NO: 362639 - DNA, 25 bp, Artificial
  Probe
gaagacggtcgaacttgactatcta

SEQ ID NO: 362640 - DNA, 25 bp, Artificial
  Probe
cggtcgaacttgactatctagagga

SEQ ID NO: 362641 - DNA, 25 bp, Artificial
  Probe
aggtgaacctgcggaaggatcatta

SEQ ID NO: 362642 - DNA, 25 bp, Artificial
  Probe
ggccttgcggagcgctgagaagacg

SEQ ID NO: 362643 - DNA, 25 bp, Artificial
  Probe
tgagaagacggtcgaacttgactat

SEQ ID NO: 362644 - DNA, 25 bp, Artificial
  Probe
cggcccacggccttgcggagcgctg

SEQ ID NO: 362645 - DNA, 25 bp, Artificial
  Probe
gtaggtgaacctgcggaaggatcat

SEQ ID NO: 362646 - DNA, 25 bp, Artificial
  Probe
ctactaccgattggatggtttagtg

SEQ ID NO: 362647 - DNA, 25 bp, Artificial
  Probe
tttagtgaggccctcggatcggccc

SEQ ID NO: 362648 - DNA, 25 bp, Artificial
  Probe
acggccttgcggagcgctgagaaga

SEQ ID NO: 362649 - DNA, 25 bp, Artificial
  Probe
gtttagtgaggccctcggatcggcc

SEQ ID NO: 362650 - DNA, 25 bp, Artificial
  Probe
aacttgactatctagaggaagtaaa

SEQ ID NO: 362651 - DNA, 25 bp, Artificial
  Probe
gtcgctactaccgattggatggttt

SEQ ID NO: 362652 - DNA, 25 bp, Artificial
  Probe
actaccgattggatggtttagtgag

SEQ ID NO: 362653 - DNA, 25 bp, Artificial
  Probe
acttgactatctagaggaagtaaaa

SEQ ID NO: 362654 - DNA, 25 bp, Artificial
  Probe
tccgtaggtgaacctgcggaaggat

SEQ ID NO: 362655 - DNA, 25 bp, Artificial
  Probe
ttccgtaggtgaacctgcggaagga

SEQ ID NO: 362656 - DNA, 25 bp, Artificial
  Probe
cgctactaccgattggatggtttag

SEQ ID NO: 362657 - DNA, 25 bp, Artificial
  Probe
ccgtaggtgaacctgcggaaggatc

SEQ ID NO: 362658 - DNA, 25 bp, Artificial
  Probe
tgcggagcgctgagaagacggtcga

SEQ ID NO: 362659 - DNA, 25 bp, Artificial
  Probe
ggtcggcccacggccttgcggagcg

SEQ ID NO: 362660 - DNA, 25 bp, Artificial
  Probe
cacggccttgcggagcgctgagaag

SEQ ID NO: 362661 - DNA, 25 bp, Artificial
  Probe
acggtcgaacttgactatctagagg

SEQ ID NO: 362662 - DNA, 25 bp, Artificial
  Probe
tggtttagtgaggccctcggatcgg

SEQ ID NO: 362663 - DNA, 25 bp, Artificial
  Probe
tagtgaggccctcggatcggccccg

SEQ ID NO: 362664 - DNA, 25 bp, Artificial
  Probe
tttccgtaggtgaacctgcggaagg

SEQ ID NO: 362665 - DNA, 25 bp, Artificial
  Probe
accgattggatggtttagtgaggcc

SEQ ID NO: 362666 - DNA, 25 bp, Artificial
  Probe
agtgaggccctcggatcggccccgc

SEQ ID NO: 362667 - DNA, 25 bp, Artificial
  Probe
gccttgcggagcgctgagaagacgg

SEQ ID NO: 362668 - DNA, 25 bp, Artificial
  Probe
tgaggccctcggatcggccccgccg

SEQ ID NO: 362669 - DNA, 25 bp, Artificial
  Probe
cgcccgtcgctactaccgattggat

SEQ ID NO: 362670 - DNA, 25 bp, Artificial
  Probe
cgattggatggtttagtgaggccct

SEQ ID NO: 362671 - DNA, 25 bp, Artificial
  Probe
tactaccgattggatggtttagtga

SEQ ID NO: 362672 - DNA, 25 bp, Artificial
  Probe
caaggtttccgtaggtgaacctgcg

SEQ ID NO: 362673 - DNA, 25 bp, Artificial
  Probe
gtgaggccctcggatcggccccgcc

SEQ ID NO: 362674 - DNA, 25 bp, Artificial
  Probe
cgtaggtgaacctgcggaaggatca

SEQ ID NO: 362675 - DNA, 25 bp, Artificial
  Probe
atggtttagtgaggccctcggatcg

SEQ ID NO: 362676 - DNA, 25 bp, Artificial
  Probe
cggagcgctgagaagacggtcgaac

SEQ ID NO: 362677 - DNA, 25 bp, Artificial
  Probe
gcccgtcgctactaccgattggatg

SEQ ID NO: 362678 - DNA, 25 bp, Artificial
  Probe
ttgactatctagaggaagtaaaagt

SEQ ID NO: 362679 - DNA, 25 bp, Artificial
  Probe
cccacggccttgcggagcgctgaga

SEQ ID NO: 362680 - DNA, 25 bp, Artificial
  Probe
ccacggccttgcggagcgctgagaa

SEQ ID NO: 362681 - DNA, 25 bp, Artificial
  Probe
gaacttgactatctagaggaagtaa

SEQ ID NO: 362682 - DNA, 25 bp, Artificial
  Probe
cagatcaaaaccaacccggtcagcc

SEQ ID NO: 362683 - DNA, 25 bp, Artificial
  Probe
actgcgaatggctcattaaatcagt

SEQ ID NO: 362684 - DNA, 25 bp, Artificial
  Probe
aatggctcattaaatcagttatggt

SEQ ID NO: 362685 - DNA, 25 bp, Artificial
  Probe
ctcaaagattaagccatgcatgtct

SEQ ID NO: 362686 - DNA, 25 bp, Artificial
  Probe
cgcgtgcatttatcagatcaaaacc

SEQ ID NO: 362687 - DNA, 25 bp, Artificial
  Probe
aaagattaagccatgcatgtctaag

SEQ ID NO: 362688 - DNA, 25 bp, Artificial
  Probe
tgtctcaaagattaagccatgcatg

SEQ ID NO: 362689 - DNA, 25 bp, Artificial
  Probe
atatgcttgtctcaaagattaagcc

SEQ ID NO: 362690 - DNA, 25 bp, Artificial
  Probe
gccatgcatgtctaagtacgcacgg

SEQ ID NO: 362691 - DNA, 25 bp, Artificial
  Probe
gcatatgcttgtctcaaagattaag

SEQ ID NO: 362692 - DNA, 25 bp, Artificial
  Probe
tgatcctgccagtagcatatgcttg

SEQ ID NO: 362693 - DNA, 25 bp, Artificial
  Probe
cttgtctcaaagattaagccatgca

SEQ ID NO: 362694 - DNA, 25 bp, Artificial
  Probe
gattaagccatgcatgtctaagtac

SEQ ID NO: 362695 - DNA, 25 bp, Artificial
  Probe
cggccggtacagtgaaactgcgaat

SEQ ID NO: 362696 - DNA, 25 bp, Artificial
  Probe
tatcagatcaaaaccaacccggtca

SEQ ID NO: 362697 - DNA, 25 bp, Artificial
  Probe
gcttgtctcaaagattaagccatgc

SEQ ID NO: 362698 - DNA, 25 bp, Artificial
  Probe
acctggttgatcctgccagtagcat

SEQ ID NO: 362699 - DNA, 25 bp, Artificial
  Probe
cagtagcatatgcttgtctcaaaga

SEQ ID NO: 362700 - DNA, 25 bp, Artificial
  Probe
catgtctaagtacgcacggccggta

SEQ ID NO: 362701 - DNA, 25 bp, Artificial
  Probe
atgcttgtctcaaagattaagccat

SEQ ID NO: 362702 - DNA, 25 bp, Artificial
  Probe
ttgatcctgccagtagcatatgctt

SEQ ID NO: 362703 - DNA, 25 bp, Artificial
  Probe
gtagcatatgcttgtctcaaagatt

SEQ ID NO: 362704 - DNA, 25 bp, Artificial
  Probe
gggacgcgtgcatttatcagatcaa

SEQ ID NO: 362705 - DNA, 25 bp, Artificial
  Probe
gcatgtctaagtacgcacggccggt

SEQ ID NO: 362706 - DNA, 25 bp, Artificial
  Probe
tatgcttgtctcaaagattaagcca

SEQ ID NO: 362707 - DNA, 25 bp, Artificial
  Probe
tacagtgaaactgcgaatggctcat

SEQ ID NO: 362708 - DNA, 25 bp, Artificial
  Probe
tgcttgtctcaaagattaagccatg

SEQ ID NO: 362709 - DNA, 25 bp, Artificial
  Probe
agtagcatatgcttgtctcaaagat

SEQ ID NO: 362710 - DNA, 25 bp, Artificial
  Probe
agcatatgcttgtctcaaagattaa

SEQ ID NO: 362711 - DNA, 25 bp, Artificial
  Probe
agtgaaactgcgaatggctcattaa

SEQ ID NO: 362712 - DNA, 25 bp, Artificial
  Probe
acgcacggccggtacagtgaaactg

SEQ ID NO: 362713 - DNA, 25 bp, Artificial
  Probe
gaatggctcattaaatcagttatgg

SEQ ID NO: 362714 - DNA, 25 bp, Artificial
  Probe
gttgatcctgccagtagcatatgct

SEQ ID NO: 362715 - DNA, 25 bp, Artificial
  Probe
aagccatgcatgtctaagtacgcac

SEQ ID NO: 362716 - DNA, 25 bp, Artificial
  Probe
taagccatgcatgtctaagtacgca

SEQ ID NO: 362717 - DNA, 25 bp, Artificial
  Probe
tcctgccagtagcatatgcttgtct

SEQ ID NO: 362718 - DNA, 25 bp, Artificial
  Probe
gacgcgtgcatttatcagatcaaaa

SEQ ID NO: 362719 - DNA, 25 bp, Artificial
  Probe
cgcacggccggtacagtgaaactgc

SEQ ID NO: 362720 - DNA, 25 bp, Artificial
  Probe
atcctgccagtagcatatgcttgtc

SEQ ID NO: 362721 - DNA, 25 bp, Artificial
  Probe
gtgaaactgcgaatggctcattaaa

SEQ ID NO: 362722 - DNA, 25 bp, Artificial
  Probe
tgggggggacgcgtgcatttatcag

SEQ ID NO: 362723 - DNA, 25 bp, Artificial
  Probe
gtctaagtacgcacggccggtacag

SEQ ID NO: 362724 - DNA, 25 bp, Artificial
  Probe
gcacggccggtacagtgaaactgcg

SEQ ID NO: 362725 - DNA, 25 bp, Artificial
  Probe
ctgcgaatggctcattaaatcagtt

SEQ ID NO: 362726 - DNA, 25 bp, Artificial
  Probe
tgccagtagcatatgcttgtctcaa

SEQ ID NO: 362727 - DNA, 25 bp, Artificial
  Probe
aagattaagccatgcatgtctaagt

SEQ ID NO: 362728 - DNA, 25 bp, Artificial
  Probe
gatcctgccagtagcatatgcttgt

SEQ ID NO: 362729 - DNA, 25 bp, Artificial
  Probe
tgaaactgcgaatggctcattaaat

SEQ ID NO: 362730 - DNA, 25 bp, Artificial
  Probe
ccatgcatgtctaagtacgcacggc

SEQ ID NO: 362731 - DNA, 25 bp, Artificial
  Probe
gccagtagcatatgcttgtctcaaa

SEQ ID NO: 362732 - DNA, 25 bp, Artificial
  Probe
cctggttgatcctgccagtagcata

SEQ ID NO: 362733 - DNA, 25 bp, Artificial
  Probe
ttgtctcaaagattaagccatgcat

SEQ ID NO: 362734 - DNA, 25 bp, Artificial
  Probe
agccatgcatgtctaagtacgcacg

SEQ ID NO: 362735 - DNA, 25 bp, Artificial
  Probe
catatgcttgtctcaaagattaagc

SEQ ID NO: 362736 - DNA, 25 bp, Artificial
  Probe
gtctcaaagattaagccatgcatgt

SEQ ID NO: 362737 - DNA, 25 bp, Artificial
  Probe
tcagatcaaaaccaacccggtcagc

SEQ ID NO: 362738 - DNA, 25 bp, Artificial
  Probe
cctgccagtagcatatgcttgtctc

SEQ ID NO: 362739 - DNA, 25 bp, Artificial
  Probe
acggccggtacagtgaaactgcgaa

SEQ ID NO: 362740 - DNA, 25 bp, Artificial
  Probe
catgcatgtctaagtacgcacggcc

SEQ ID NO: 362741 - DNA, 25 bp, Artificial
  Probe
ggacgcgtgcatttatcagatcaaa

SEQ ID NO: 362742 - DNA, 25 bp, Artificial
  Probe
cttcccgtgggggggacgcgtgcat

SEQ ID NO: 362743 - DNA, 25 bp, Artificial
  Probe
ccagtagcatatgcttgtctcaaag

SEQ ID NO: 362744 - DNA, 25 bp, Artificial
  Probe
agattaagccatgcatgtctaagta

SEQ ID NO: 362745 - DNA, 25 bp, Artificial
  Probe
cgtgcatttatcagatcaaaaccaa

SEQ ID NO: 362746 - DNA, 25 bp, Artificial
  Probe
acgcgtgcatttatcagatcaaaac

SEQ ID NO: 362747 - DNA, 25 bp, Artificial
  Probe
ggttgatcctgccagtagcatatgc

SEQ ID NO: 362748 - DNA, 25 bp, Artificial
  Probe
atgcatgtctaagtacgcacggccg

SEQ ID NO: 362749 - DNA, 25 bp, Artificial
  Probe
tagcatatgcttgtctcaaagatta

SEQ ID NO: 362750 - DNA, 25 bp, Artificial
  Probe
attaagccatgcatgtctaagtacg

SEQ ID NO: 362751 - DNA, 25 bp, Artificial
  Probe
atcagatcaaaaccaacccggtcag

SEQ ID NO: 362752 - DNA, 25 bp, Artificial
  Probe
gaaactgcgaatggctcattaaatc

SEQ ID NO: 362753 - DNA, 25 bp, Artificial
  Probe
tacctggttgatcctgccagtagca

SEQ ID NO: 362754 - DNA, 25 bp, Artificial
  Probe
tacgcacggccggtacagtgaaact

SEQ ID NO: 362755 - DNA, 25 bp, Artificial
  Probe
ttaagccatgcatgtctaagtacgc

SEQ ID NO: 362756 - DNA, 25 bp, Artificial
  Probe
ctgccagtagcatatgcttgtctca

SEQ ID NO: 362757 - DNA, 25 bp, Artificial
  Probe
cgaatggctcattaaatcagttatg

SEQ ID NO: 362758 - DNA, 25 bp, Artificial
  Probe
cagtgaaactgcgaatggctcatta

SEQ ID NO: 362759 - DNA, 25 bp, Artificial
  Probe
aactgcgaatggctcattaaatcag

SEQ ID NO: 362760 - DNA, 25 bp, Artificial
  Probe
tgcatgtctaagtacgcacggccgg

SEQ ID NO: 362761 - DNA, 25 bp, Artificial
  Probe
cacggccggtacagtgaaactgcga

SEQ ID NO: 362762 - DNA, 25 bp, Artificial
  Probe
cggaagggcaccaccaggagtgggc

SEQ ID NO: 362763 - DNA, 25 bp, Artificial
  Probe
tagttggatcttgggagcgggcggg

SEQ ID NO: 362764 - DNA, 25 bp, Artificial
  Probe
agctcgtagttggatcttgggagcg

SEQ ID NO: 362765 - DNA, 25 bp, Artificial
  Probe
caccaggagtgggcctgcggcttaa

SEQ ID NO: 362766 - DNA, 25 bp, Artificial
  Probe
attccagctccaatagcgtatatta

SEQ ID NO: 362767 - DNA, 25 bp, Artificial
  Probe
gtagttggatcttgggagcgggcgg

SEQ ID NO: 362768 - DNA, 25 bp, Artificial
  Probe
aaagttgctgcagttaaaaagctcg

SEQ ID NO: 362769 - DNA, 25 bp, Artificial
  Probe
ctccaatagcgtatattaaagttgc

SEQ ID NO: 362770 - DNA, 25 bp, Artificial
  Probe
gggcaccaccaggagtgggcctgcg

SEQ ID NO: 362771 - DNA, 25 bp, Artificial
  Probe
aattgacggaagggcaccaccagga

SEQ ID NO: 362772 - DNA, 25 bp, Artificial
  Probe
cagctccaatagcgtatattaaagt

SEQ ID NO: 362773 - DNA, 25 bp, Artificial
  Probe
attgacggaagggcaccaccaggag

SEQ ID NO: 362774 - DNA, 25 bp, Artificial
  Probe
ggtccgccgcgaggcgagtcaccgc

SEQ ID NO: 362775 - DNA, 25 bp, Artificial
  Probe
ggaagggcaccaccaggagtgggcc

SEQ ID NO: 362776 - DNA, 25 bp, Artificial
  Probe
tccgccgcgaggcgagtcaccgccc

SEQ ID NO: 362777 - DNA, 25 bp, Artificial
  Probe
tattaaagttgctgcagttaaaaag

SEQ ID NO: 362778 - DNA, 25 bp, Artificial
  Probe
gacggaagggcaccaccaggagtgg

SEQ ID NO: 362779 - DNA, 25 bp, Artificial
  Probe
accaggagtgggcctgcggcttaat

SEQ ID NO: 362780 - DNA, 25 bp, Artificial
  Probe
cgaggcgagtcaccgcccgtccccg

SEQ ID NO: 362781 - DNA, 25 bp, Artificial
  Probe
taaaaagctcgtagttggatcttgg

SEQ ID NO: 362782 - DNA, 25 bp, Artificial
  Probe
tcttgggagcgggcgggcggtccgc

SEQ ID NO: 362783 - DNA, 25 bp, Artificial
  Probe
aaaagctcgtagttggatcttggga

SEQ ID NO: 362784 - DNA, 25 bp, Artificial
  Probe
gttaaaaagctcgtagttggatctt

SEQ ID NO: 362785 - DNA, 25 bp, Artificial
  Probe
tccagctccaatagcgtatattaaa

SEQ ID NO: 362786 - DNA, 25 bp, Artificial
  Probe
ggcaccaccaggagtgggcctgcgg

SEQ ID NO: 362787 - DNA, 25 bp, Artificial
  Probe
tcgtagttggatcttgggagcgggc

SEQ ID NO: 362788 - DNA, 25 bp, Artificial
  Probe
gctcgtagttggatcttgggagcgg

SEQ ID NO: 362789 - DNA, 25 bp, Artificial
  Probe
aaagctcgtagttggatcttgggag

SEQ ID NO: 362790 - DNA, 25 bp, Artificial
  Probe
ttggatcttgggagcgggcgggcgg

SEQ ID NO: 362791 - DNA, 25 bp, Artificial
  Probe
accaccaggagtgggcctgcggctt

SEQ ID NO: 362792 - DNA, 25 bp, Artificial
  Probe
ttccagctccaatagcgtatattaa

SEQ ID NO: 362793 - DNA, 25 bp, Artificial
  Probe
ccaccaggagtgggcctgcggctta

SEQ ID NO: 362794 - DNA, 25 bp, Artificial
  Probe
taaagttgctgcagttaaaaagctc

SEQ ID NO: 362795 - DNA, 25 bp, Artificial
  Probe
aagttgctgcagttaaaaagctcgt

SEQ ID NO: 362796 - DNA, 25 bp, Artificial
  Probe
gatcttgggagcgggcgggcggtcc

SEQ ID NO: 362797 - DNA, 25 bp, Artificial
  Probe
acggaagggcaccaccaggagtggg

SEQ ID NO: 362798 - DNA, 25 bp, Artificial
  Probe
tatattaaagttgctgcagttaaaa

SEQ ID NO: 362799 - DNA, 25 bp, Artificial
  Probe
ggatcttgggagcgggcgggcggtc

SEQ ID NO: 362800 - DNA, 25 bp, Artificial
  Probe
gaagggcaccaccaggagtgggcct

SEQ ID NO: 362801 - DNA, 25 bp, Artificial
  Probe
ccaggagtgggcctgcggcttaatt

SEQ ID NO: 362802 - DNA, 25 bp, Artificial
  Probe
agggcaccaccaggagtgggcctgc

SEQ ID NO: 362803 - DNA, 25 bp, Artificial
  Probe
aaaaagctcgtagttggatcttggg

SEQ ID NO: 362804 - DNA, 25 bp, Artificial
  Probe
agttaaaaagctcgtagttggatct

SEQ ID NO: 362805 - DNA, 25 bp, Artificial
  Probe
ctcgtagttggatcttgggagcggg

SEQ ID NO: 362806 - DNA, 25 bp, Artificial
  Probe
gcaccaccaggagtgggcctgcggc

SEQ ID NO: 362807 - DNA, 25 bp, Artificial
  Probe
caccaccaggagtgggcctgcggct

SEQ ID NO: 362808 - DNA, 25 bp, Artificial
  Probe
aagggcaccaccaggagtgggcctg

SEQ ID NO: 362809 - DNA, 25 bp, Artificial
  Probe
atcttgggagcgggcgggcggtccg

SEQ ID NO: 362810 - DNA, 25 bp, Artificial
  Probe
tgacggaagggcaccaccaggagtg

SEQ ID NO: 362811 - DNA, 25 bp, Artificial
  Probe
attaaagttgctgcagttaaaaagc

SEQ ID NO: 362812 - DNA, 25 bp, Artificial
  Probe
ccagctccaatagcgtatattaaag

SEQ ID NO: 362813 - DNA, 25 bp, Artificial
  Probe
ttgggagcgggcgggcggtccgccg

SEQ ID NO: 362814 - DNA, 25 bp, Artificial
  Probe
tggatcttgggagcgggcgggcggt

SEQ ID NO: 362815 - DNA, 25 bp, Artificial
  Probe
aagctcgtagttggatcttgggagc

SEQ ID NO: 362816 - DNA, 25 bp, Artificial
  Probe
atattaaagttgctgcagttaaaaa

SEQ ID NO: 362817 - DNA, 25 bp, Artificial
  Probe
agctccaatagcgtatattaaagtt

SEQ ID NO: 362818 - DNA, 25 bp, Artificial
  Probe
ttgacggaagggcaccaccaggagt

SEQ ID NO: 362819 - DNA, 25 bp, Artificial
  Probe
ccgccgcgaggcgagtcaccgcccg

SEQ ID NO: 362820 - DNA, 25 bp, Artificial
  Probe
cgccgcgaggcgagtcaccgcccgt

SEQ ID NO: 362821 - DNA, 25 bp, Artificial
  Probe
gttggatcttgggagcgggcgggcg

SEQ ID NO: 362822 - DNA, 25 bp, Artificial
  Probe
ttaaagttgctgcagttaaaaagct

SEQ ID NO: 362823 - DNA, 25 bp, Artificial
  Probe
cggtccgccgcgaggcgagtcaccg

SEQ ID NO: 362824 - DNA, 25 bp, Artificial
  Probe
cgtagttggatcttgggagcgggcg

SEQ ID NO: 362825 - DNA, 25 bp, Artificial
  Probe
gtccgccgcgaggcgagtcaccgcc

SEQ ID NO: 362826 - DNA, 25 bp, Artificial
  Probe
agttggatcttgggagcgggcgggc

SEQ ID NO: 362827 - DNA, 25 bp, Artificial
  Probe
gaggcgagtcaccgcccgtccccgc

SEQ ID NO: 362828 - DNA, 25 bp, Artificial
  Probe
gctccaatagcgtatattaaagttg

SEQ ID NO: 362829 - DNA, 25 bp, Artificial
  Probe
tgggagcgggcgggcggtccgccgc

SEQ ID NO: 362830 - DNA, 25 bp, Artificial
  Probe
ttaaaaagctcgtagttggatcttg
